(19) United States
(12) Patent Application Publication
(10) Pub. No.: US 2022/0000921 A1
(43) Pub. Date: Jan. 6, 2022

(54) Modified Cell Expressing Therapeutic Agent and Uses thereof

(71) Applicant: Innovative Cellular Therapeutics Holdings, Ltd., Rockville, MD (US)

(72) Inventors: Lei Xiao, Rockville, MD (US); Chengfei Pu, Shanghai (CN); Zhiyuan Cao, Shanghai (CN)

(73) Assignee: Innovative Cellular Therapeutics Holdings, Ltd., Grand Cayman (KY)

(21) Appl. No.: 17/295,364

(22) PCT Filed: Nov. 20, 2019
(86) PCT No.: PCT/US2019/062417

§ 371 Date: May 19, 2021

Related U.S. Application Data
(63) Continuation of application No. 16/445,965, filed on Jun. 19, 2019, now Pat. No. 10,918,667.
(60) Provisional application No. 62/902,766, filed on Sep. 19, 2019.
(60) Provisional application No. 62/889,926, filed on Aug. 21, 2019.
(60) Provisional application No. 62/848,961, filed on May 16, 2019.
(60) Provisional application No. 62/846,563, filed on May 10, 2019.
(60) Provisional application No. 62/828,770, filed on Apr. 3, 2019.
(60) Provisional application No. 62/795,810, filed on Jan. 23, 2019.
(60) Provisional application No. 62/774,595, filed on Dec. 3, 2018.
(60) Provisional application No. 62/769,987, filed on Nov. 20, 2018.

(51) Int. Cl. A61K 35/17; C07K 14/54; C07K 14/57; C07K 14/705; C07K 14/725; C07K 16/28

(52) U.S. Cl. CPC A61K 35/17; C07K 14/5412; C07K 14/57; C07K 14/70521; C07K 14/7051; A61K 2039/505; C07K 16/2803; C07K 2317/622; C07K 2319/33; C07K 2319/30; C07K 2319/03; C07K 14/70578

(57) ABSTRACT

Compositions and methods for enhancing T cell response which increases the efficacy of CAR T cell therapy for treating cancer are described. Embodiments include a modified cell comprising an isolated nucleic acid comprising a first nucleic acid and a second nucleic acid, the first nucleic acid encoding a chimeric antigen receptor (CAR), the second nucleic acid encoding a therapeutic agent comprising at least one of IFN-_{y}, IL-2, IL-6, IL-7, IL-15, IL-17, and IL-23. The modified cell expresses and secretes the therapeutic agent.

### CROSS REFERENCE TO RELATED APPLICATIONS

[0001] This application claims the benefit of U.S. patent application Ser. No. 16/445,965, filed Jun. 19, 2019; which claims the benefit of U.S. Provisional Application No. 62/848,961, filed May 16, 2019; U.S. Provisional Application No. 62/846,563, filed May 10, 2019; U.S. Provisional Application No. 62/828,770, filed Apr. 3, 2019; U.S. Provisional Application No. 62/795,810, filed Jan. 23, 2019; U.S. Provisional Application No. 62/774,595, filed Dec. 3, 2018; and U.S. Provisional Application No. 62/769,987, filed Nov. 20, 2018, which are incorporated by reference herein in their entirety. This Application also claims the benefit of U.S. Provisional Application No. 62/902,766, filed Sep. 19, 2019; and U.S. Provisional Application No. 62/889,926, filed Aug. 21, 2019; which are incorporated by reference herein in their entirety.

### SEQUENCE LISTING INFORMATION

[0002] A computer readable textfile, entitled “Sequence Listing_ST25.txt,” created on or about Nov. 13, 2019, with a file size of about 1.32 MB, contains the sequence listing for this application and is hereby incorporated by reference in its entirety.

### TECHNICAL FIELD

[0003] The present disclosure relates to compositions and methods related to chimeric antigen receptor cells secreting therapeutic agents and uses thereof in the treatment of diseases, including cancer.

### BACKGROUND

[0004] Cancer involves abnormal cell growth with the potential to invade or spread to other parts of the body. In humans, there are more than one hundred types of cancer. One example is breast cancer occurring in the epithelial tissue of the breast. Since breast cancer cells lose the characteristics of normal cells, the connection between breast cancer cells is lost. Once cancer cells are exfoliated, they spread over the entire body via the blood and/or lymph systems and therefore become life-threatening. Currently, breast cancer has become one of the common threats to women's physical and mental health. Although immunotherapy, for example, CAR T cell therapy, has been proven to be effective for treating cancer, there is still a need to improve such immunotherapy so that it is more effective for certain cancers such as those involving solid tumors.

### SUMMARY

[0005] The present disclosure describes compositions and methods for enhancing T cell response. The present disclosure also describes cells comprising an isolated nucleic acid comprising a nucleic acid and an additional nucleic acid, the nucleic acid encoding a chimeric antigen receptor (CAR), the additional nucleic acid encoding a therapeutic agent comprising at least one of IFN-γ, IL-2, IL-6, IL-7, IL-15, IL-17, IL-12, and IL-23. The cells may conditionally express and secrete the therapeutic agent.

[0006] This Summary is not intended to identify key features or essential features of the claimed subject matter, nor is it intended to be used to limit the scope of the claimed subject matter.

### BRIEF DESCRIPTION OF THE DRAWINGS

[0007] The Detailed Description is described with reference to the accompanying figures. The use of the same reference numbers in different figures indicates similar or identical items.

[0008] FIG. 1 shows a schematic diagram of exemplary fusion proteins.

[0009] FIG. 2 shows a schematic diagram of exemplary fusion proteins.

[0010] FIG. 3 shows a schematic diagram of exemplary fusion proteins.

[0011] FIG. 4 shows a schematic diagram of exemplary fusion proteins.

[0012] FIG. 5 shows a schematic diagram of an exemplary CAR molecule and a fusion protein.

[0013] FIG. 6 shows a schematic diagram of an exemplary CAR molecule and a protein expressed by a modified cell.

[0014] FIG. 7 shows a schematic diagram of an exemplary CAR molecule and one or more proteins expressed by a modified cell.

[0015] FIG. 8 shows a schematic diagram of an exemplary CAR molecule and one or more proteins expressed by a modified cell.

[0016] FIG. 9 shows a schematic diagram of an exemplary CAR molecule and one or more proteins (Agent 1 and Agent 2) expressed by a modified cell.

[0017] FIG. 10 shows a schematic diagram of an exemplary CAR molecule and one or more proteins expressed by a modified cell.

[0018] FIGS. 11, 12, and 13 show cytokines released in response to the infusion of CD19CAR T cells for treating B-ALL (B-Cell Acute Lymphoblastic Leukemia).

[0019] FIGS. 14 and 15 show results of flow cytometry assay indicating macrophage phenotype changes.

[0020] FIG. 16 shows results of cytometry assay indicating macrophage phenotype changes after the macrophages were co-cultured with various CAR T cells expressing IFN-γ and/or IL-6.

[0021] FIG. 17 show schematic diagrams of various constructs of CAR and therapeutic agents expressed by modified cells.

[0022] FIG. 18 shows results of flow cytometry assay of T cells expressing various proteins shown in FIG. 17.

[0023] FIG. 19 shows the release of IL-6 by modified cells in response to CD3/CD28 Dynabeads activation.

[0024] FIG. 20 shows the release of IL-6 by modified cells in response to co-culturing with Nalm6 cells.

[0025] FIG. 21 shows the release of IFNγ by modified cells in response to CD3/CD28 Dynabeads activation.

[0026] FIG. 22 shows the release of IFNγ (IFNg) by modified cells in response to co-culturing with Nalm6 cells.

[0027] FIG. 23 shows the killing assay results of various CAR T cells.

[0028] FIGS. 24 and 25 show the expression of certain proteins on modified cells and the release of IFNγ by modified cells in response to co-culturing with Nalm6 cells.

[0029] FIGS. 26 and 27 show the expression of certain proteins on modified cells and the release of IL-12 and IFNγ by modified cells in response to CD3/CD28 Dynabeads activation.

[0030] FIGS. 28 and 29 show the expression of certain proteins on modified cell and the release of IL-6 and IFNγ by modified cells in response to CD3/CD28 Dynabeads activation.

[0031] FIG. 30 shows the results of the anaerobic assay on various CAR T cells.

[0032] FIG. 31 shows cytokines released in response to hypoxia in the TSHR-CART system.

[0033] FIGS. 32 and 33 show cytokines released in response to the induction of IL-12 expression in CAR T cells.

[0034] FIG. 34 shows cytokines released in response to hypoxia in the GUCY2C-CART system.

[0035] FIG. 35 shows IFNγ release in response to the induction of IL-12 expression in CAR T cells.

[0036] FIG. 36 shows the release of IL-6, TNFα, IFNγ, and GZMB induced by T cell activation in the ACPP-CART system.

[0037] FIGS. 37 and 38 show cytokines released by modified cells in response to hypoxia in the ACPP-CART system.

[0038] FIG. 39 shows the results of cytokine release assay indicating that IL-6 and IFNγ are released by various types of CAR T cells in different conditions after the CAR T cells were cultured with or without antigen for 24 hours.

[0039] FIGS. 40, 41, 42, and 43 show levels of cytokines released and other parameters in response to CAR T cell infusion in Patient 005.

[0040] FIGS. 44 and 45 show various parameters in response to CAR T cell infusion in Patient 004.

[0041] FIGS. 46 and 47 show cytokines released in response to the infusion of CAR T cells on Patient 006.

[0042] FIG. 48 shows tumor changes before and after the CAR T cell infusion of Patient 005 by PET/CT images.

[0043] FIG. 49 shows tumor changes before and after the CAR T cell infusion of Patient 006 by CT images.

[0044] FIGS. 50 and 51 show comparisons of cytokines released among Patients 004, 005, and 006.

[0045] FIG. 52 shows the expansion of T cells in each of groups.

[0046] FIG. 53 shows tumor changes before and after the CAR T cell infusion of Patient 007 by PET/CT images.

[0047] FIG. 54 show cytokines released in response to the infusion of CAR T cells on Patient 007.

[0048] FIG. 55 shows a schematic diagram of an exemplary modified cell.

[0049] FIG. 56 shows a schematic diagram an exemplary population of modified cells.

### DETAILED DESCRIPTION

[0050] Unless defined otherwise, all technical and scientific terms used herein have the same meaning as commonly understood by those of ordinary skill in the art to which the disclosure belongs. Although any method and material similar or equivalent to those described herein can be used in the practice or testing of the present disclosure, preferred methods and materials are described. For the purposes of the present disclosure, the following terms are defined below.

[0051] The articles “a” and “an” are used herein to refer to one or to more than one (i.e., to at least one) of the grammatical object of the article. By way of example, “an element” means one element or more than one element.

[0052] By “about” is meant a quantity, level, value, number, frequency, percentage, dimension, size, amount, weight or length that varies by as much as 20, 15, 10, 9, 8, 7, 6, 5, 4, 3, 2 or 1% to a reference quantity, level, value, number, frequency, percentage, dimension, size, amount, weight or length.

[0053] The term “activation,” as used herein, refers to the state of a cell that has been sufficiently stimulated to induce detectable cellular proliferation. Activation can also be associated with induced cytokine production and detectable effector functions. The term “activated T cells” refers to, among other things, T cells that are undergoing cell division.

[0054] The term “antibody” is used in the broadest sense and refers to monoclonal antibodies (including full length monoclonal antibodies), polyclonal antibodies, multi-specific antibodies (e.g., bispecific antibodies), and antibody fragments so long as they exhibit the desired biological activity or function. The antibodies in the present disclosure may exist in a variety of forms including, for example, polyclonal antibodies; monoclonal antibodies; Fv, Fab, Fab′, and F(ab)₂ and fragments; as well as single chain antibodies and humanized antibodies (Harlow et al., 1999, In: Using Antibodies: A Laboratory Manual, Cold Spring Harbor Laboratory Press, N.Y.; Harlow et al., 1989, In: Antibodies: A Laboratory Manual, Cold Spring Harbor, N.Y.; Houston et al., 1988, Proc. Natl. Acad. Sci. USA 85:5879-5883; Bird et al., 1988, Science 242:423-426).

[0055] The term “antibody fragments” refers to a portion of a full-length antibody, for example, the antigen binding or variable region of the antibody. Other examples of antibody fragments include Fab, Fab′, F(ab′)2, and Fv fragments; diabodies; linear antibodies; single-chain antibody molecules; and multi-specific antibodies formed from antibody fragments.

[0056] The term “Fv” refers to the minimum antibody fragment which contains a complete antigen-recognition and -binding site. This fragment consists of a dimer of one heavy- and one light-chain variable region domain in tight, non-covalent association. From the folding of these two domains emanates six hypervariable loops (3 loops each from the H and L chain) that contribute amino acid residues for antigen binding and confer antigen binding specificity to the antibody. However, even a single variable domain (or half of an Fv including only three complementarity determining regions (CDRs) specific for an antigen) has the ability to recognize and bind antigen, although at a lower affinity than the entire binding site (the dimer).

[0057] An “antibody heavy chain,” as used herein, refers to the larger of the two types of polypeptide chains present in all antibody molecules in their naturally occurring conformations. An “antibody light chain,” as used herein, refers to the smaller of the two types of polypeptide chains present in all antibody molecules in their naturally occurring conformations. K and A light chains refer to the two major antibody light chain isotypes.

[0058] The term “synthetic antibody” refers to an antibody which is generated using recombinant DNA technology, such as, for example, an antibody expressed by a bacteriophage. The term also includes an antibody which has been generated by the synthesis of a DNA molecule encoding the antibody and the expression of the DNA molecule to obtain the antibody or to obtain an amino acid encoding the antibody. The synthetic DNA is obtained using technology that is available and well known in the art.

[0059] The term “antigen” refers to a molecule that provokes an immune response, which may involve either antibody production, or the activation of specific immunologically-competent cells, or both. Antigens include any macromolecule, including all proteins or peptides, or molecules derived from recombinant or genomic DNA. For example, DNA including a nucleotide sequence or a partial nucleotide sequence encoding a protein or peptide that elicits an immune response, and therefore, encodes an “antigen” as the term is used herein. An antigen need not be encoded solely by a full-length nucleotide sequence of a gene. An antigen can be generated, synthesized or derived from a biological sample including a tissue sample, a tumor sample, a cell, or a biological fluid.

[0060] The term “anti-tumor effect” as used herein, refers to a biological effect associated with a decrease in tumor volume, a decrease in the number of tumor cells, a decrease in the number of metastases, decrease in tumor cell proliferation, decrease in tumor cell survival, an increase in life expectancy of a subject having tumor cells, or amelioration of various physiological symptoms associated with the cancerous condition. An “anti-tumor effect” can also be manifested by the ability of the peptides, polynucleotides, cells, and antibodies in the prevention of the occurrence of tumors in the first place.

[0061] The term “auto-antigen” refers to an endogenous antigen mistakenly recognized by the immune system as being foreign. Auto-antigens include cellular proteins, phosphoproteins, cellular surface proteins, cellular lipids, nucleic acids, glycoproteins, including cell surface receptors.

[0062] The term “autologous” is used to describe a material derived from a subject that is subsequently re-introduced into the same subject.

[0063] The term “allogeneic” is used to describe a graft derived from a different subject of the same species. As an example, a donor subject may be a related or unrelated or recipient subject, but the donor subject has immune system markers that are similar to the recipient subject.

[0064] The term “xenogeneic” is used to describe a graft derived from a subject of a different species. As an example, the donor subject is from a different species than a recipient subject, and the donor subject and the recipient subject can be genetically and immunologically incompatible.

[0065] The term “cancer” is used to refer to a disease characterized by the rapid and uncontrolled growth of aberrant cells. Cancer cells can spread locally or through the bloodstream and lymphatic system to other parts of the body. Examples of various cancers include breast cancer, prostate cancer, ovarian cancer, cervical cancer, skin cancer, pancreatic cancer, colorectal cancer, renal cancer, liver cancer, brain cancer, lymphoma, leukemia, lung cancer, and the like.

[0066] Throughout this specification, unless the context requires otherwise, the words “comprise,” “includes” and “including” will be understood to imply the inclusion of a stated step or element or group of steps or elements but not the exclusion of any other step or element or group of steps or elements.

[0067] The phrase “consisting of” is meant to include, and is limited to, whatever follows the phrase “consisting of.” Thus, the phrase “consisting of” indicates that the listed elements are required or mandatory and that no other elements may be present.

[0068] The phrase “consisting essentially of” is meant to include any element listed after the phrase and can include other elements that do not interfere with or contribute to the activity or action specified in the disclosure for the listed elements. Thus, the phrase “consisting essentially of” indicates that the listed elements are required or mandatory, but that other elements are optional and may or may not be present depending upon whether or not they affect the activity or action of the listed elements.

[0069] The terms “complementary” and “complementarity” refer to polynucleotides (i.e., a sequence of nucleotides) related by the base-pairing rules. For example, the sequence “A-G-T,” is complementary to the sequence “T-C-A.” Complementarity may be “partial,” in which only some of the nucleic acids' bases are matched according to the base-pairing rules, or there may be “complete” or “total” complementarity between the nucleic acids. The degree of complementarity between nucleic acid strands has significant effects on the efficiency and strength of hybridization between nucleic acid strands.

[0070] The term “corresponds to” or “corresponding to” refers to (a) a polynucleotide having a nucleotide sequence that is substantially identical or complementary to all or a portion of a reference polynucleotide sequence or encoding an amino acid sequence identical to an amino acid sequence in a peptide or protein; or (b) a peptide or polypeptide having an amino acid sequence that is substantially identical to a sequence of amino acids in a reference peptide or protein.

[0071] The term “co-stimulatory ligand,” refers to a molecule on an antigen-presenting cell (e.g., an APC, dendritic cell, B cell, and the like) that specifically binds a cognate co-stimulatory molecule on a T cell, thereby providing a signal which, in addition to the primary signal provided by, for instance, binding of a TCR/CD3 complex with an MHC molecule loaded with peptide, mediates a T cell response, including at least one of proliferation, activation, differentiation, and other cellular responses. A co-stimulatory ligand can include B7-1 (CD80), B7-2 (CD86), PD-L1, PD-L2, 4-1BBL, OX40L, inducible co-stimulatory ligand (ICOS-L), intercellular adhesion molecule (ICAM), CD30L, CD40, CD70, CD83, HLA-G, MICA, MICB, HVEM, lymphotoxin beta receptor, 3/TR6, ILT3, ILT4, HVEM, a ligand for CD7, an agonist or antibody that binds the Toll ligand receptor and a ligand that specifically binds with B7-H3. A co-stimulatory ligand also includes, inter alia, an agonist or an antibody that specifically binds with a co-stimulatory molecule present on a T cell, such as CD27, CD28, 4-1 BB, OX40, CD30, CD40, PD-1, ICOS, lymphocyte function-associated antigen-1 (LFA-1), CD2, CD7, LIGHT, NKG2C, B7-H3, and a ligand that specifically binds CD83.

[0072] The term “co-stimulatory molecule” refers to the cognate binding partner on a T cell that specifically binds with a co-stimulatory ligand, thereby mediating a co-stimulatory response by the T cell, such as proliferation. Co-stimulatory molecules include an MHC class I molecule, BTLA, and a Toll-like receptor.

[0073] The term “co-stimulatory signal” refers to a signal, which in combination with a primary signal, such as TCR/CD3 ligation, leads to T cell proliferation and/or upregulation or downregulation of key molecules. The terms “disease” and “condition” may be used interchangeably or may be different in that the particular malady or condition may not have a known causative agent (so that etiology has not yet been worked out), and it is therefore not yet recognized as a disease but only as an undesirable condition or syndrome, wherein a more or less specific set of symptoms have been identified by clinicians. The term “disease” is a state of health of a subject wherein the subject cannot maintain homeostasis, and wherein if the disease is not ameliorated, then the subject's health continues to deteriorate. In contrast, a “disorder” in a subject is a state of health in which the animal is able to maintain homeostasis, but in which the animal's state of health is less favorable than it would be in the absence of the disorder. Left untreated, a disorder does not necessarily cause a further decrease in the animal's state of health.

[0074] The term “effective” refers to adequate to accomplish a desired, expected, or intended result. For example, an “effective amount” in the context of treatment may be an amount of a compound sufficient to produce a therapeutic or prophylactic benefit.

[0075] The term “encoding” refers to the inherent property of specific sequences of nucleotides in a polynucleotide, such as a gene, a cDNA, or an mRNA, to serve as a template for synthesis of other polymers and macromolecules in biological processes having either a defined sequence of nucleotides (i.e., rRNA, tRNA and mRNA) or a defined sequence of amino acids and the biological properties resulting therefrom. Thus, a gene encodes a protein if transcription and translation of mRNA corresponding to that gene produces the protein in a cell or other biological system. Both the coding strand, the nucleotide sequence of which is identical to the mRNA sequence (except that a “T” is replaced by a “U”) and is usually provided in sequence listings, and the non-coding strand, used as the template for transcription of a gene or cDNA, can be referred to as encoding the protein or other product of that gene or cDNA.

[0076] The term “exogenous” refers to a molecule that does not naturally occur in a wild-type cell or organism but is typically introduced into the cell by molecular biological techniques. Examples of exogenous polynucleotides include vectors, plasmids, and/or man-made nucleic acid constructs encoding the desired protein. With regard to polynucleotides and proteins, the term “endogenous” or “native” refers to naturally-occurring polynucleotide or amino acid sequences that may be found in a given wild-type cell or organism. Also, a particular polynucleotide sequence that is isolated from a first organism and transferred to a second organism by molecular biological techniques is typically considered an “exogenous” polynucleotide or amino acid sequence with respect to the second organism. In specific embodiments, polynucleotide sequences can be “introduced” by molecular biological techniques into a microorganism that already contains such a polynucleotide sequence, for instance, to create one or more additional copies of an otherwise naturally-occurring polynucleotide sequence, and thereby facilitate overexpression of the encoded polypeptide.

[0077] The term “expression or overexpression” refers to the transcription and/or translation of a particular nucleotide sequence into a precursor or mature protein, for example, driven by its promoter. “Overexpression” refers to the production of a gene product in transgenic organisms or cells that exceeds levels of production in normal or non-transformed organisms or cells. As defined herein, the term “expression” refers to expression or overexpression.

[0078] The term “expression vector” refers to a vector including a recombinant polynucleotide including expression control (regulatory) sequences operably linked to a nucleotide sequence to be expressed. An expression vector includes sufficient cis-acting elements for expression; other elements for expression can be supplied by the host cell or in an in vitro expression system. Expression vectors include all those known in the art, such as cosmids, plasmids (e.g., naked or contained in liposomes) and viruses (e.g., lentiviruses, retroviruses, adenoviruses, and adeno-associated viruses) that incorporate the recombinant polynucleotide.

[0079] The term “homologous” refers to sequence similarity or sequence identity between two polypeptides or between two polynucleotides when a position in both of the two compared sequences is occupied by the same base or amino acid monomer subunit, e.g., if a position in each of two DNA molecules is occupied by adenine, then the molecules are homologous at that position. The percent of homology between two sequences is a function of the number of matching or homologous positions shared by the two sequences divided by the number of positions compared ×100. For example, if 6 of 10 of the positions in two sequences are matched or homologous, then the two sequences are 60% homologous. By way of example, the DNA sequences ATTGCC and TATGGC share 50% homology. A comparison is made when two sequences are aligned to give maximum homology.

[0080] The term “immunoglobulin” or “Ig,” refers to a class of proteins, which function as antibodies. The five members included in this class of proteins are IgA, IgG, IgM, IgD, and IgE. IgA is the primary antibody that is present in body secretions, such as saliva, tears, breast milk, gastrointestinal secretions and mucus secretions of the respiratory and genitourinary tracts. IgG is the most common circulating antibody. IgM is the main immunoglobulin produced in the primary immune response in most subjects. It is the most efficient immunoglobulin in agglutination, complement fixation, and other antibody responses, and is important in defense against bacteria and viruses. IgD is the immunoglobulin that has no known antibody function but may serve as an antigen receptor. IgE is the immunoglobulin that mediates immediate hypersensitivity by causing the release of mediators from mast cells and basophils upon exposure to the allergen.

[0081] The term “isolated” refers to a material that is substantially or essentially free from components that normally accompany it in its native state. The material can be a cell or a macromolecule such as a protein or nucleic acid. For example, an “isolated polynucleotide,” as used herein, refers to a polynucleotide, which has been purified from the sequences which flank it in a naturally-occurring state, e.g., a DNA fragment which has been removed from the sequences that are normally adjacent to the fragment. Alternatively, an “isolated peptide” or an “isolated polypeptide” and the like, as used herein, refer to in vitro isolation and/or purification of a peptide or polypeptide molecule from its natural cellular environment, and from association with other components of the cell.

[0082] The term “substantially purified” refers to a material that is substantially free from components that are normally associated with it in its native state. For example, a substantially purified cell refers to a cell that has been separated from other cell types with which it is normally associated in its naturally occurring or native state. In some instances, a population of substantially purified cells refers to a homogenous population of cells. In other instances, this term refers simply to a cell that has been separated from the cells with which they are naturally associated in their natural state. In embodiments, the cells are cultured in vitro. In embodiments, the cells are not cultured in vitro.

[0083] In the context of the present disclosure, the following abbreviations for the commonly occurring nucleic acid bases are used. “A” refers to adenosine, “C” refers to cytosine, “G” refers to guanosine, “T” refers to thymidine, and “U” refers to uridine.

[0084] Unless otherwise specified, a “nucleotide sequence encoding an amino acid sequence” includes all nucleotide sequences that are degenerate versions of each other and that encode the same amino acid sequence. The phrase nucleotide sequence that encodes a protein or an RNA may also include introns to the extent that the nucleotide sequence encoding the protein may in some version contain an intron(s).

[0085] The term “lentivirus” refers to a genus of the Retroviridae family. Lentiviruses are unique among the retroviruses in being able to infect non-dividing cells; they can deliver a significant amount of genetic information into the DNA of the host cell, so they are one of the most efficient methods of a gene delivery vector. Moreover, the use of lentiviruses enables the integration of the genetic information into the host chromosome, resulting in stably transduced genetic information. HIV, SIV, and FIV are all examples of lentiviruses. Vectors derived from lentiviruses offer the means to achieve significant levels of gene transfer in vivo.

[0086] The term “modulating,” refers to mediating a detectable increase or decrease in the level of a response in a subject compared with the level of a response in the subject in the absence of a treatment or compound, and/or compared with the level of a response in an otherwise identical but untreated subject. The term encompasses perturbing and/or affecting a native signal or response, thereby mediating a beneficial therapeutic response in a subject, preferably, a human.

[0087] Nucleic acid is “operably linked” when it is placed into a functional relationship with another polynucleotide. For example, DNA for a presequence or secretory leader is operably linked to DNA for a polypeptide if it is expressed as a preprotein that participates in the secretion of the polypeptide; a promoter or enhancer is operably linked to a coding sequence if it affects the transcription of the sequence; or a ribosome binding site is operably linked to a coding sequence if it is positioned so as to facilitate translation.

[0088] The term “under transcriptional control” refers to a promoter being operably linked to and in the correct location and orientation in relation to a polynucleotide to control (regulate) the initiation of transcription by RNA polymerase and expression of the polynucleotide.

[0089] The term “overexpressed” tumor antigen or “overexpression” of the tumor antigen is intended to indicate an abnormal level of expression of the tumor antigen in a cell from a disease area such as a solid tumor within a specific tissue or organ of the patient relative to the level of expression in a normal cell from that tissue or organ. Patients having solid tumors or a hematological malignancy characterized by overexpression of the tumor antigen can be determined by standard assays known in the art.

[0090] Cancers that may be treated include tumors that are not vascularized, or not yet substantially vascularized, as well as vascularized tumors. The cancers may include non-solid tumors (such as hematological tumors, for example, leukemia, lymphoma, and multiple myeloma) or may include solid tumors. Types of cancers to be treated with the CARs of the disclosure include, but are not limited to, carcinoma, blastoma, and sarcoma, and certain leukemia or lymphoid malignancies, benign and malignant tumors, and malignancies, e.g., sarcomas, carcinomas, and melanomas. Adult tumors/cancers and pediatric tumors/cancers are also included.

[0091] Hematologic cancers are cancers of the blood or bone marrow. Examples of hematological (or hematogenous) cancers include leukemias, including acute leukemias (such as acute lymphocytic leukemia, acute myelocytic leukemia, acute myelogenous leukemia and myeloblastic, promyelocytic, myelomonocytic, monocytic and erythroleukemia), chronic leukemias (such as chronic myelocytic (granulocytic) leukemia, chronic myelogenous leukemia, and chronic lymphocytic leukemia), polycythemia vera, lymphoma, Hodgkin's disease, non-Hodgkin's lymphoma (indolent and high grade forms), multiple myeloma, Waldenstrom's macroglobulinemia, heavy chain disease, myelodysplastic syndrome, hairy cell leukemia and myelodysplasia.

[0092] Solid tumors are abnormal masses of tissue that usually do not contain cysts or liquid areas. Solid tumors can be benign or malignant. Different types of solid tumors are named for the type of cells that form them (such as sarcomas, carcinomas, and lymphomas). Examples of solid tumors, such as sarcomas and carcinomas, include fibrosarcoma, myxosarcoma, liposarcoma, chondrosarcoma, osteosarcoma, and other sarcomas, synovioma, mesothelioma, Ewing's tumor, leiomyosarcoma, rhabdomyosarcoma, colon carcinoma, lymphoid malignancy, pancreatic cancer, breast cancer, lung cancers, ovarian cancer, prostate cancer, hepatocellular carcinoma, squamous cell carcinoma, basal cell carcinoma, adenocarcinoma, sweat gland carcinoma, medullary thyroid carcinoma, papillary thyroid carcinoma, pheochromocytomas sebaceous gland carcinoma, papillary carcinoma, papillary adenocarcinomas, medullary carcinoma, bronchogenic carcinoma, renal cell carcinoma, hepatoma, bile duct carcinoma, choriocarcinoma, Wilms' tumor, cervical cancer, testicular tumor, seminoma, bladder carcinoma, melanoma, and CNS tumors (such as a glioma (such as brainstem glioma and mixed gliomas), glioblastoma (also known as glioblastoma multiforme), astrocytoma, CNS lymphoma, germinoma, medulloblastoma, Schwannoma craniopharyogioma, ependymoma, pinealoma, hemangioblastoma, acoustic neuroma, oligodendroglioma, menangioma, neuroblastoma, retinoblastoma, and brain metastases).

[0093] A solid tumor antigen is an antigen expressed on a solid tumor. In embodiments, the solid tumor antigen is also expressed at low levels on healthy tissue. Examples of solid tumor antigens and their related disease tumors are provided in Table 1.

TABLE 1

| Solid Tumor antigen | Disease tumor |
|---|---|
| PRLR | Breast Cancer |
| CLCA1 | colorectal cancer |
| MUC12 | colorectal cancer |
| GUCY2C | colorectal cancer |
| GPR35 | colorectal cancer |
| CR1L | Gastric Cancer |
| MUC 17 | Gastric Cancer |
| TMPRSS11B | esophageal cancer |
| MUC21 | esophageal cancer |
| TMPRSS11E | esophageal cancer |
| CD207 | bladder Cancer |
| SLC30A8 | pancreatic Cancer |
| CFC1 | pancreatic Cancer |
| SLC12A3 | Cervical Cancer |
| SSTR1 | Cervical tumor |
| GPR27 | Ovary tumor |
| FZD10 | Ovary tumor |
| TSHR | Thyroid Tumor |
| SIGLEC15 | Urothelial cancer |
| SLC6A3 | Renal cancer |
| KISS1R | Renal cancer |
| QRFPR | Renal cancer: |
| GPR119 | Pancreatic cancer |
| CLDN6 | Endometrial cancer/Urothelial cancer |
| UPK2 | Urothelial cancer (including bladder cancer) |
| ADAM12 | Breast cancer, pancreatic cancer and the like |
| SLC45A3 | Prostate cancer |
| ACPP | Prostate cancer |
| MUC21 | Esophageal cancer |
| MUC16 | Ovarian cancer |
| MS4A12 | Colorectal cancer |
| ALPP | Endometrial cancer |
| CEA | Colorectal carcinoma |
| EphA2 | Glioma |
| FAP | Mesothelioma |
| GPC3 | Lung squamous cell carcinoma |
| IL13-Rα2 | Glioma |
| Mesothelin | Metastatic cancer |
| PSMA | Prostate cancer |
| ROR1 | Breast lung carcinoma |
| VEGFR-II | Metastatic cancer |
| GD2 | Neuroblastoma |
| FR-α | Ovarian carcinoma |
| ErbB2 | Carcinomas |
| EpCAM | Carcinomas |
| EGFRvIII | Glioma-Glioblastoma |
| EGFR | Glioma-NSCL cancer |
| tMUC 1 | Cholangiocarcinoma, Pancreatic cancer, Breast |
| | Cancer |
| B7-H3 | Ewing sarcoma (bone tumor), rhabdomyosarcoma, |
| | nephroblastoma, neuroblastoma and |
| | medulloblastoma (brain tumor) |

[0094] The term “parenteral administration” of a composition includes, e.g., subcutaneous (s.c.), intravenous (i.v.), intramuscular (i.m.), intrasternal injection, or infusion techniques.

[0095] The terms “patient,” “subject,” and “individual,” and the like are used interchangeably herein and refer to any human, or animal, amenable to the methods described herein. In certain non-limiting embodiments, the patient, subject, or individual is a human or animal. In embodiments, the term “subject” is intended to include living organisms in which an immune response can be elicited (e.g., mammals). Examples of subjects include humans, and animals such as dogs, cats, mice, rats, and transgenic species thereof.

[0096] A subject in need of treatment or in need thereof includes a subject having a disease, condition, or disorder that needs to be treated. A subject in need thereof also includes a subject that needs treatment for the prevention of a disease, condition, or disorder. In embodiments, the disease, condition, or disorder is cancer.

[0097] The term “polynucleotide” or “nucleic acid” refers to mRNA, RNA, cRNA, rRNA, cDNA or DNA. The term typically refers to a polymeric form of nucleotides of at least 10 bases in length, either ribonucleotides or deoxynucleotides or a modified form of either type of nucleotide. The term includes all forms of nucleic acids including single and double-stranded forms of nucleic acids.

[0098] The terms “polynucleotide variant” and “variant” and the like refer to polynucleotides displaying substantial sequence identity with a reference polynucleotide sequence or polynucleotides that hybridize with a reference sequence under stringent conditions that are defined hereinafter. These terms also encompass polynucleotides that are distinguished from a reference polynucleotide by the addition, deletion or substitution of at least one nucleotide. Accordingly, the terms “polynucleotide variant” and “variant” include polynucleotides in which one or more nucleotides have been added or deleted or replaced with different nucleotides. In this regard, it is well understood in the art that certain alterations inclusive of mutations, additions, deletions, and substitutions can be made to a reference polynucleotide whereby the altered polynucleotide retains the biological function or activity of the reference polynucleotide or has increased activity in relation to the reference polynucleotide (i.e., optimized). Polynucleotide variants include, for example, polynucleotides having at least 50% (and at least 51% to at least 99% and all integer percentages in between, e.g., 90%, 95%, or 98%) sequence identity with a reference polynucleotide sequence described herein. The terms “polynucleotide variant” and “variant” also include naturally-occurring allelic variants and orthologs.

[0099] The terms “polypeptide,” “polypeptide fragment,” “peptide,” and “protein” are used interchangeably herein to refer to a polymer of amino acid residues and to variants and synthetic analogues of the same. Thus, these terms apply to amino acid polymers in which one or more amino acid residues are synthetic non-naturally occurring amino acids, such as a chemical analogue of a corresponding naturally occurring amino acid, as well as to naturally-occurring amino acid polymers. In certain aspects, polypeptides may include enzymatic polypeptides, or “enzymes,” which typically catalyze (i.e., increase the rate of) various chemical reactions.

[0100] The term “polypeptide variant” refers to polypeptides that are distinguished from a reference polypeptide sequence by the addition, deletion, or substitution of at least one amino acid residue. In certain embodiments, a polypeptide variant is distinguished from a reference polypeptide by one or more substitutions, which may be conservative or non-conservative. In certain embodiments, the polypeptide variant comprises conservative substitutions and, in this regard, it is well understood in the art that some amino acids may be changed to others with broadly similar properties without changing the nature of the activity of the polypeptide. Polypeptide variants also encompass polypeptides in which one or more amino acids have been added or deleted or replaced with different amino acid residues.

[0101] The term “promoter” refers to a DNA sequence recognized by the synthetic machinery of the cell or introduced synthetic machinery, required to initiate the specific transcription of a polynucleotide sequence. The term “expression control (regulatory) sequences” refers to DNA sequences necessary for the expression of an operably linked coding sequence in a particular host organism. The control (regulatory) sequences that are suitable for prokaryotes, for example, include a promoter, optionally an operator sequence, and a ribosome binding site. Eukaryotic cells are known to utilize promoters, polyadenylation signals, and enhancers.

[0102] The term “bind,” “binds,” or “interacts with” refers to a molecule recognizing and adhering to a second molecule in a sample or organism but does not substantially recognize or adhere to other structurally unrelated molecules in the sample. The term “specifically binds,” as used herein with respect to an antibody, refers to an antibody which recognizes a specific antigen, but does not substantially recognize or bind other molecules in a sample. For example, an antibody that specifically binds an antigen from one species may also bind that antigen from one or more species. But, such cross-species reactivity does not itself alter the classification of an antibody as specific. In another example, an antibody that specifically binds an antigen may also bind different allelic forms of the antigen. However, such cross reactivity does not itself alter the classification of an antibody as specific. In some instances, the terms “specific binding” or “specifically binding,” can be used in reference to the interaction of an antibody, a protein, or a peptide with a second chemical species, to mean that the interaction is dependent upon the presence of a particular structure (e.g., an antigenic determinant or epitope) on the chemical species; for example, an antibody recognizes and binds a specific protein structure rather than to any protein. If an antibody is specific for epitope “A,” the presence of a molecule containing epitope A (or free, unlabeled A), in a reaction containing labeled “A” and the antibody, will reduce the amount of labeled A bound to the antibody.

[0103] By “statistically significant,” it is meant that the result was unlikely to have occurred by chance. Statistical significance can be determined by any method known in the art. Commonly used measures of significance include the p-value, which is the frequency or probability with which the observed event would occur if the null hypothesis were true. If the obtained p-value is smaller than the significance level, then the null hypothesis is rejected. In simple cases, the significance level is defined at a p-value of 0.5 or less. A “decreased” or “reduced” or “lesser” amount is typically a “statistically significant” or a physiologically significant amount, and may include a decrease that is about 1.1, 1.2, 1.3, 1.4, 1.5, 1.6 1.7, 1.8, 1.9, 2, 2.5, 3, 3.5, 4, 4.5, 5, 6, 7, 8, 9, 10, 15, 20, 30, 40, or 50 or more times (e.g., 100, 500, 1000 times) (including all integers and decimal points in between and above 1, e.g., 1.5, 1.6, 1.7. 1.8, etc.) an amount or level described herein.

[0104] The term “stimulation,” refers to a primary response induced by binding of a stimulatory molecule (e.g., a TCR/CD3 complex) with its cognate ligand thereby mediating a signal transduction event, such as signal transduction via the TCR/CD3 complex. Stimulation can mediate altered expression of certain molecules, such as downregulation of TGF-β, and/or reorganization of cytoskeletal structures.

[0105] The term “stimulatory molecule” refers to a molecule on a T cell that specifically binds a cognate stimulatory ligand present on an antigen-presenting cell. For example, a functional signaling domain derived from a stimulatory molecule is the zeta chain associated with the T cell receptor complex. The stimulatory molecule includes a domain responsible for signal transduction.

[0106] The term “stimulatory ligand” refers to a ligand that when present on an antigen-presenting cell (e.g., an APC, a dendritic cell, a B-cell, and the like) can specifically bind with a cognate binding partner (referred to herein as a “stimulatory molecule”) on a cell, for example a T cell, thereby mediating a primary response by the T cell, including activation, initiation of an immune response, proliferation, and similar processes. Stimulatory ligands are well-known in the art and encompass, inter alia, an MHC Class I molecule loaded with a peptide, an anti-CD3 antibody, a superagonist anti-CD28 antibody, and a superagonist anti-CD2 antibody.

[0107] The term “therapeutic” refers to treatment and/or prophylaxis. A therapeutic effect is obtained by suppression, remission, or eradication of a disease state or alleviating the symptoms of a disease state.

[0108] The term “therapeutically effective amount” refers to the amount of the subject compound that will elicit the biological or medical response of a tissue, system, or subject that is being sought by the researcher, veterinarian, medical doctor or another clinician. The term “therapeutically effective amount” includes that amount of a compound that, when administered, is sufficient to prevent the development of, or alleviate to some extent, one or more of the signs or symptoms of the disorder or disease being treated. The therapeutically effective amount will vary depending on the compound, the disease and its severity and the age, weight, and other factors, of the subject to be treated.

[0109] The term “treat a disease” refers to the reduction of the frequency or severity of at least one sign or symptom of a disease or disorder experienced by a subject.

[0110] The term “transfected” or “transformed” or “transduced” refers to a process by which an exogenous nucleic acid is transferred or introduced into the host cell. A “transfected” or “transformed” or “transduced” cell is one which has been transfected, transformed, or transduced with exogenous nucleic acid. The cell includes the primary subject cell and its progeny.

[0111] The term “vector” refers to a polynucleotide that comprises an isolated nucleic acid and which can be used to deliver the isolated nucleic acid to the interior of a cell. Numerous vectors are known in the art including linear polynucleotides, polynucleotides associated with ionic or amphiphilic compounds, plasmids, and viruses. Thus, the term “vector” includes an autonomously replicating plasmid or a virus. The term also includes non-plasmid and non-viral compounds which facilitate the transfer of nucleic acid into cells, such as, for example, polylysine compounds, liposomes, and the like. Examples of viral vectors include adenoviral vectors, adeno-associated virus vectors, retroviral vectors, and others. For example, lentiviruses are complex retroviruses, which, in addition to the common retroviral genes gag, pol, and env, contain other genes with regulatory or structural function. Lentiviral vectors are well known in the art. Some examples of lentivirus include the Human Immunodeficiency Viruses: HIV-1, HIV-2, and the Simian Immunodeficiency Virus: SIV. Lentiviral vectors have been generated by multiply attenuating the HIV virulence genes, for example, the genes env, vif, vpr, vpu, and nef are deleted making the vector biologically safe.

[0112] Ranges: throughout this disclosure, various aspects of the disclosure can be presented in a range format. It should be understood that the description in range format is merely for convenience and brevity and should not be construed as an inflexible limitation on the scope of the disclosure. Accordingly, the description of a range should be considered to have specifically disclosed all the possible subranges as well as individual numerical values within that range. For example, description of a range such as from 1 to 6 should be considered to have specifically disclosed subranges such as from 1 to 3, from 1 to 4, from 1 to 5, from 2 to 4, from 2 to 6, from 3 to 6 etc., as well as individual numbers within that range, for example, 1, 2, 2.7, 3, 4, 5, 5.3, and 6. This applies regardless of the breadth of the range.

[0113] A “chimeric antigen receptor” (CAR) molecule is a recombinant polypeptide including at least an extracellular domain, a transmembrane domain, and a cytoplasmic domain or intracellular domain. In embodiments, the domains of the CAR are on the same polypeptide chain, for example, a chimeric fusion protein. In embodiments, the domains are on different polypeptide chains, for example, the domains are not contiguous.

[0114] The extracellular domain of a CAR molecule includes an antigen binding domain. In embodiments, the antigen binding domain binds an antigen, for example, a cell surface molecule or marker, on the surface of a B cell. In embodiments, the cell surface molecule of a B cell includes CD19, CD22, CD20, BCMA, CD5, CD7, CD2, CD16, CD56, CD30, CD14, CD68, CD11b, CD18, CD169, CD1c, CD33, CD38, CD138, or CD13. In embodiments, the cell surface molecule of the B cell is CD19, CD20, CD22, or BCMA. In particular embodiments, the cell surface molecule of the B cell is CD19.

[0115] In embodiments, the antigen binding domain binds an antigen, on the surface of a tumor, for example, a tumor antigen or tumor marker. Tumor antigens are proteins that are produced by tumor cells that elicit an immune response, particularly T cell-mediated immune responses. Tumor antigens are well known in the art and include, for example, tumor-associated MUC1 (tMUC1), a glioma-associated antigen, carcinoembryonic antigen (CEA), β-human chorionic gonadotropin, alphafetoprotein (AFP), lectin-reactive AFP, thyroglobulin, RAGE-1, MN-CA IX, human telomerase reverse transcriptase, RU1, RU2 (AS), intestinal carboxyl esterase, mut hsp70-2, M-CSF, prostase, prostate-specific antigen (PSA), PAP, NY-ESO-1, LAGE-1a, p53, prostein, PSMA, Her2/neu, surviving, telomerase, prostate-carcinoma tumor antigen-1 (PCTA-1), MAGE, ELF2M, neutrophil elastase, ephrinB2, CD22, insulin growth factor (IGF)-I, IGF-II, IGF-I receptor and mesothelin. For example, when the tumor antigen is CD19, and the CAR thereof can be referred to as CD19CAR and the T cell comprising CD19CAR can be referred to a CART19 cell or CD19CAR T cell.

[0116] In embodiments, the extracellular antigen binding domain of a CAR includes at least one scFv or at least a single domain antibody. As an example, there can be two scFvs on a CAR. The scFv includes a light chain variable (VL) region and a heavy chain variable (VH) region of a target antigen-specific monoclonal antibody joined by a flexible linker. Single chain variable region fragments can be made by linking light and/or heavy chain variable regions by using a short linking peptide (Bird et al., Science 242:423-426, 1988). An example of a linking peptide is the GS linker having the amino acid sequence (GGGGS)3 (SEQ ID NO: 278), which bridges approximately 3.5 nm between the carboxy terminus of one variable region and the amino terminus of the other variable region. Linkers of other sequences have been designed and used (Bird et al., 1988, supra). In general, linkers can be short, flexible polypeptides and preferably comprised of about 20 or fewer amino acid residues. The single-chain variants can be produced either recombinantly or synthetically. For synthetic production of scFv, an automated synthesizer can be used. For recombinant production of scFv, a suitable plasmid containing polynucleotide that encodes the scFv can be introduced into a suitable host cell, either eukaryotic, such as yeast, plant, insect or mammalian cells, or prokaryotic, such as E. coli. Polynucleotides encoding the scFv of interest can be made by routine manipulations such as ligation of polynucleotides. The resultant scFv can be isolated using standard protein purification techniques known in the art.

[0117] In embodiments, the CAR molecules described herein comprises one or more CDRs for binding an antigen of interest, for example, one or more CDRs for binding CD19 or tMUC1.

[0118] The cytoplasmic domain of the CAR molecules described herein includes one or more co-stimulatory domains and one or more signaling domains. The co-stimulatory and signaling domains function to transmit the signal and activate molecules, such as T cells, in response to antigen binding. The one or more co-stimulatory domains are derived from stimulatory molecules and/or co-stimulatory molecules, and the signaling domain is derived from a primary signaling domain, such as the CD3 zeta domain. In embodiments, the signaling domain further includes one or more functional signaling domains derived from a co-stimulatory molecule. In embodiments, the co-stimulatory molecules are cell surface molecules (other than antigens receptors or their ligands) that are required for activating a cellular response to an antigen.

[0119] In embodiments, the co-stimulatory domain includes the intracellular domain of CD27, CD28, 4-1BB, OX40, CD30, CD40, PD-1, ICOS, lymphocyte function-associated antigen-1 (LFA-1), CD2, CD7, LIGHT, NKG2C, B7-H3, a ligand that specifically binds CD83, or any combination thereof. In embodiments, the signaling domain includes a CD3 zeta domain derived from a T cell receptor.

[0120] In embodiments, the cytoplasmic domain of the CAR only includes one or more stimulatory domains and no signaling domain.

[0121] The CAR molecules also include a transmembrane domain. The incorporation of a transmembrane domain in the CAR molecules stabilizes the molecule. In embodiments, the transmembrane domain of the CAR molecules is the transmembrane domain of a CD28 or 4-1BB molecule.

[0122] Between the extracellular domain and the transmembrane domain of the CAR, there may be incorporated a spacer domain. As used herein, the term “spacer domain” generally means any oligo- or polypeptide that functions to link the transmembrane domain to, either the extracellular domain or, the cytoplasmic domain on the polypeptide chain. A spacer domain may include up to 300 amino acids, preferably 10 to 100 amino acids, and most preferably 25 to 50 amino acids.

[0123] Although immunotherapy using CAR T has brought hope to many patients to cure their cancer, CAR T therapy can cause cytokine storm (or cytokine release syndrome (CRS)). Cytokine storm refers to the activation and rapid proliferation of T lymphocytes in vivo after completion of CAR T infusion in humans, causing excessive release of TNF-α, IFN-γ, IL-2, IL-4, IL-6, IL-8, IL-10 and other cytokines. These cytokines mediate a variety of immune responses, causing high-grade fever, hypotension, myalgia, coagulopathy, dyspnea, end-organ disorder and other clinical manifestations, which may cause serious permanent damage or failure of the human tissues and organs. However, activation and rapid proliferation of lymphocytes are closely related to the efficacy of immunotherapy, and cytokines appear to be involved in the activation and proliferation of lymphocytes. Embodiments described herein relate to the discovery that lymphocytes may be engineered to conditionally express and/or secrete one or more cytokines to have enhanced but manageable immune response in a subject. In embodiments, the expression and/or secretion of the one or more cytokines may be regulated by one or more conditions, such as the presence of an antigen that the lymphocytes recognize, the level of oxygen (e.g., hypoxia), the level of pH values, the presence of a drug (e.g., doxycycline for a rtTA-TRE system), the presence of a transcription factor in immune response, and other immune associated conditions.

### CAR Molecule(s) and Therapeutic Agent(s)

[0124] The present disclosure describes isolated nucleic acids including a (first) nucleic acid encoding a CAR and an additional (second) nucleic acid encoding one or more therapeutic agents. In embodiments, the first nucleic acid and the second nucleic acid are on separate isolated nucleic acids. In embodiments, the first and second nucleic acid are on the same isolated nucleic acid. In embodiments, the one or more therapeutic agents comprise at least one cytokine, or a derivative thereof. Different types of cytokines have been discovered, including chemokines, interferons (IFNs), interleukins (ILs), lymphokines, and tumor necrosis factors (TNFs).

[0125] In embodiments, the one or more therapeutic agents comprise at least one of IFN-γ, IL-2, IL-6, IL-7, IL-15, IL-17, IL-23, or derivatives thereof. In embodiments, the therapeutic agent is Eomes, TRAF6, IL12, IL2, IL18, IL23, AQP9, Runx3, AMPK, BCL-2, or a combination thereof.

[0126] The present disclosure also describes isolated nucleic acids including a first nucleic acid encoding a first CAR and a second nucleic acid encoding the one or more therapeutic agents. Moreover, the present disclosure describes isolated nucleic acids including a third nucleic acid encoding a second (or additional) CAR. In embodiments, a separate isolated nucleic acid includes a nucleic acid encoding the second CAR. In embodiments, the first nucleic acid and the second nucleic acid are on separate isolated nucleic acids.

[0127] In embodiments, the polynucleotide may integrate into the genome of the modified cell and descendants of the modified cell will also express the polynucleotide, resulting in a stably transfected modified cell. In embodiments, the modified cell may express the polynucleotide encoding the CAR but the polynucleotide does not integrate into the genome of the modified cell such that the modified cell expresses the transiently transfected polynucleotide for a finite period of time, for example a few days, after which the polynucleotide is lost through cell division or other cellular processes. As an example, the polynucleotide is present in the modified cell in a recombinant DNA construct, in an mRNA, or in a viral vector, and/or the polynucleotide is an mRNA, which is not integrated into the genome of the modified cell.

[0128] Embodiments relate to a method or use of the polynucleotides described herein. The method or use includes: providing a viral particle (e.g., AAV, lentivirus or their variants) comprising a vector genome, the vector genome comprising the polynucleotide, wherein the polynucleotide is operably linked to an expression control element conferring transcription of the polynucleotide; and administering an amount of the viral particle to the subject such that the polynucleotide is expressed in the subject. In embodiments, the AAV preparation includes AAV vector particles, empty capsids, and host cell impurities, thereby providing an AAV product substantially free of AAV empty capsids. More information of the administration and preparation of the viral particle may be found at the U.S. Pat. No. 9,840,719 and Milani et al., Sci. Transl. Med. 11, eaav7325 (2019) 22 May 2019, which are incorporated herein by reference.

[0129] In embodiments, a bioreactor can be inoculated at a cell density of approximately 0.5×10⁶ cells/mL with viability greater than 95%. When the cell density reaches approximately 1.0×10⁶ cells/mL, the cells may be transfected with the polyethyleneimine (PEI)/DNA complexes (polyplexes) with a PEI to DNA ratio of 2:1. At the time of harvest, AAV from the cell culture in the bioreactor may be released using the Triton X-100 method. All solutions may be added directly to the bioreactor, and the lysate centrifuged at 4000×g for 20 min. The supernatant can be stored at −80 C for further processing. AAV may be further purified. For example, AAV samples (12.3 mL) may be purified by overlaying them on top of a series of step gradients using 15, 25, 40 and 54% iodixanol concentrations containing 1, 5, 7 and 5 mL, respectively. The 15% iodixanol concentration also contains 1 M NaCl to avoid aggregation of AAV with other cellular proteins and negatively charged nuclear components. After the completion of centrifugation, 5 mL may be withdrawn from 2 mm below the 40/54 interface marked before starting the ultracentrifugation at 385,000×g for 1 h 45 min in Sorvals T-865 rotor in Sorval Ultracentrifuge. The viral vectors can then be quantified. For example, vectors AAV infectivity can be determined by the gene transfer assay (GTA) using GFP as a reporter gene in all cases. AAV infectivity assay, in which samples are diluted before addition to the cells, have the GFP positive cells in the range of 2-20% to ensure that only a single virus has entered the cell for GFP expression. The GFP-positive cells may be quantified by FACS using HEK293 cells in suspension. The AAV may be then administrated to a subject. For example, AAV may be diluted in 0.9% sterile NaCl saline solution (supplemented with 0.25% human serum albumin [HSA]) for infusion in patients and the final volume of infusion can be calculated based on the patient's weight as 3 mL/kg.

[0130] In embodiments, that first CAR includes an antigen binding domain that binds a solid tumor, and the second (or additional) CAR includes an antigen binding domain that binds a white blood cell (WBC).

[0131] The present disclosure also describes vectors including the isolated nucleic acids described herein. In embodiments, a single vector contains the isolated nucleic acid encoding the first CAR, the therapeutic agent, and the second CAR or TCR. In embodiments, a first vector contains the first nucleic acid encoding a first CAR and a nucleic acid encoding one or more therapeutic agents, and a second vector contains the nucleic acid encoding the second CAR or TCR. In embodiments, the vector comprises an isolated nucleic acid encoding a bispecific CAR including at least two antigen binding domains and one or more therapeutic agents.

[0132] In embodiments, the present disclosure describes an isolated polynucleotide comprising a polynucleotide and an additional polynucleotide, the polynucleotide encoding a chimeric antigen receptor (CAR), the additional polynucleotide encoding a therapeutic agent that is or comprises at least one of IL-2, IL-6, IL-7, IL-15, IL-17, and IL-23. In embodiments, the therapeutic agent is or comprises Eomes, TRAF6, IL12, IL2, IL18, IL23, AQP9, Runx3, AMPK, or BCL-2.

[0133] In embodiments, the present disclosure describes a pharmaceutical composition for treating a subject having a tumor using modified T cells, wherein the pharmaceutical composition comprises modified T cells comprising a first polynucleotide encoding a chimeric antigen receptor (CAR) and a second polynucleotide encoding a therapeutic agent comprising IL-6, IFN-γ, or a combination thereof. In embodiments, the tumor is a solid tumor. In embodiments, the tumor is a liquid tumor (e.g., NHL). Embodiments relate to a method of causing or inducing T cell response, enhancing T cell therapy, enhancing in vivo T cell expansion, and/or reducing M2 macrophages in a subject in need thereof, the method comprising administering an effective amount of the pharmaceutical composition to the subject. The method described herein is effective in treating a subject diagnosed with cancer. In embodiments, the subject is diagnosed with a solid tumor.

[0134] Embodiments relate to certain cytokines, for example, IL-6, IFNγ and IL-12, are selected to be expressed or overexpressed in T cells, which are used to treat tumors (e.g., solid and/or liquid tumors). These cytokines at least do not directly or indirectly weaken the killing function, the capability of inhibiting tumor cells, and/or have severe side effects on T cell therapy. Alternatively, some of these cytokines may directly or indirectly affect the killing function, the capability of inhibiting tumor cells, and/or have severe side effects on T cell therapy. However, these effects are manageable such as not to expose patients to substantial risk in light of the benefit of T cell therapy. For example, these selected cytokines are capable of enhancing T cell response. Interestingly, IL-6 was considered as a cytokine that reduces or at least has a negative impact on T cell therapy since it is the major contributor to cytokine release syndrome (CRS). However, the Examples provided herein show that the increase of IL-6 is consistent with the efficacy in treating Relapsed/Refractory (R/R) Acute Lymphoid Leukemia (ALL) using CAR T cell therapy. Surprisingly, the Examples provided herein show the infusion of CAR T cells expressing and secreting IL-6 does not cause severe CRS for treating solid tumors. Not all cytokine can be expressed and secreted by T cells without sacrificing T cells' functions to kill tumor cells and/or inhibit tumor growth. The tumor-promoting effects of certain cytokines have been reported. For example, IL-10 production by TAMs can blunt anti-tumor responses by inhibiting the functions of APCs and subsequently block T cell effector functions such as cytotoxicity (Mannino, M. H., Zhu, Z., Xiao, H., Bai, Q., Wakefield, M. R., and Fang, Y. (2015). Studies in mouse tumor models have shown that IL-10 can suppress tumor-infiltrating DC maturation and their production of IL-12 to stimulate Th1 cells, unless IL-10 signaling is simultaneously blocked (Vicari, A. P., Chiodoni, C., Vaure, C., Aït-Yahia, S., Dercamp, C., Matsos, F., Reynard, O., Taverne, C., Merle, P., Colombo, M. P., et al. (2002). Reversal of tumor-induced dendritic cell paralysis by CpG immunostimulatory oligonucleotide and anti-interleukin 10 receptor antibody. J. Exp. Med. 196, 541-549). As another example, studies have shown that TGF-β can be a potent inhibitor of T cell proliferation (Kehrl J H, Wakefield L M, Roberts A B, Jakowlew S, Alvarez-Mon M, et al. 1986. Production of transforming growth factor β (TGF-β) by human T lymphocytes and its potential role in the regulation of T cell growth. J. Exp. Med. 163:1037-50). Several mechanisms drive TGF-β-mediated inhibition of T cell proliferation, including suppression of IL-2 production, downregulation of c-myc, and upregulation of cyclin-dependent kinase inhibitors (Li M O, Wan Y Y, Sanjabi S, Robertson A K, Flavell R A. 2006. Transforming growth factor-β regulation of immune responses. Annu. Rev. Immunol. 24:99-146). In some contexts, TGF-β also plays an important role in promoting cell death to limit T cell expansion after activation (Mark A. Travis and Dean Sheppard, TGF-β Activation and Function in Immunity, Annu. Rev. Immunol. 2014. 32:51-82). Chemokines are a large family of cytokines that direct normal leukocyte migration. They also have been implicated in leukocyte development and in the pathogenesis of many diseases. Also, some chemokines' concentration gradients play an important role in intranodal T-cell migration. Expression or overexpression of these chemokines would disrupt T cell migration, thus weakening CAR T cell therapy for solid tumors. Without proper migration, T cells may not be able to reach tumor cells. For example, it has been reported that overexpression of the chemokine CCL21 disrupts T cell migration (Christopherson K W and Campbell J J, Hromas R A, Transgenic overexpression of the CC chemokine CCL21 disrupts T-cell migration, Blood. 2001 Dec. 15; 98(13):3562-8). In embodiments, cytokines over-expressed or expressed in the modified cells does not include at least one of IL-10, TGF-β. and CCL21. Certain cytokines can be overexpressed or expressed in T cells to enhance CAR T therapy treating tumors. However, some cytokines (e.g., IL-6) cannot be overexpressed or expressed in T cells to treat blood tumors. It is well-known that IL-6 is the major factor that contributes to severe CRS in CAR T treatment of blood tumors such as ALL and NHL. In contrast, IL-6 can be overexpressed or expressed in T cells for the treatment of solid tumors because the studies showed that few severe CRS in CAR T cell treatment of solid tumors. In embodiments, expression and secretion of IL-6 by T cells may be associated with a condition of T cells to avoid CRS and other syndromes associated with IL-6. For example, IL-6 may be expressed and secreted by T cells when the T cells are activated. In embodiments, expression and secretion of IL-6 by CAR T cells may be regulated by a transcription modulator such as NFAT such that the CAR T cells may neither express nor secrete IL-6 unless they recognize and bind their antigen. In embodiments, the modified cells may express and/or secrete an agent that interferes with the activities of cytokines that reduce anti-tumor activities (e.g., IL-10, TGF-β. and CCL21) using methods described in the present disclosure. In embodiments, the modified cells may express and/or secrete a scFv targeting IL-10 and/or IL-10 receptors or a soluble receptor of IL-10, for example, in response to activation of the modified cells and/or a level of oxygen (e.g., hypoxia). In embodiments, a population of modified cells may include modified cells expressing various combinations of cytokines and the agent. For example, the population of modified cells may include modified cells including a polynucleotide encoding IL-6 and IFNγ, modified cells including a polynucleotide encoding IL-12 and the agent, and/or modified cells including a polynucleotide encoding the agent. In embodiments, the modified cells may express one or more antigen binding molecules (e.g., CAR and TCR). In embodiments, the agent can be a polynucleotide encoding a protein (e.g., dominant negative form of PD-1 and fusion proteins described herein) to overexpress and/or secrete the protein in the modified cell. In embodiments, the polynucleotide can encode a genome editing tool (e.g., ZFN, TALEN, Cas9) such as to reduce a function and/or expression of a target gene in the modified cell. In embodiments, the modified cell may express a dominant negative form of a checkpoint inhibitor (e.g., PD-1). For example, it has been reported that IL-6 may increase PD-1 expression by T cells, and expression of the dominant negative form of PD-1 by the modified cells that also express IL-6 may increase the modified cells' anti-tumor activities.

[0135] It has been reported that there are many kinds of cells in solid tumor tissues, including tumor cells and some immune cells. Among them, macrophages, such as M2 macrophages are the main cells of immune cells in the solid tumor tissues. The solid tumor M2 type macrophages are inside tumor tissues secreting cytokines continuously to nourish the tumor cells. Embodiments relate to compositions and methods of reducing the number of M2 macrophages to enhance immunotherapy (e.g., CAR, TCR, and/or TIL) on a subject having cancer. In embodiments a cell (e.g., T cell or NK cell) may be modified to express one or more molecules at a level that is higher than the level of the one or more expressed by a cell that has not been modified to expression the one or more molecules such that delivery of the modified cell can reduce the number of M2 macrophages in tumor microenvironment. For example, the one or more molecules comprise IFN-γ or derivatives thereof, and the expression of IFN-γ is regulated by NFAT.

[0136] In embodiments, the modified T cells express and secrete the therapeutic agent. In embodiments, the therapeutic agent comprises IL-6 and IFN-γ. In embodiments, the modified cell comprises a nucleic acid encoding NFAT, IFN-γ, IRES/2a, and IL-6 in such order. In embodiments, the modified T cell comprises polynucleotides encoding SEQ ID NOs: 287 and 328. In embodiments, the modified T cell comprises the polynucleotides comprising SEQ ID NOs: 286 and 469, and a polynucleotide encoding SEQ ID NO: 328.

[0137] In embodiments, IFN-γ may comprise wild type IFN-γ, and derivatives of IFN-γ of which certain amino acids of IFN-γ polypeptide are removed and certain amino acids other than the removed amino acids are replaced with other amino acids. The derivatives can show higher IFN-γ activity and/or stability as compared to the wild type. Examples of some of the derivatives are included in U.S. Pat. No. 4,898,931 and US Patent Publication Nos: US2003092130 and US2006251619, which are incorporated herein by reference in their entirety.

[0138] In embodiments, the one or more therapeutic agents are IFN-α, IFN-ν, IFN-ω, IFN-ε, IFN-κ, IFN-τ, IFN-δ, IFNζ, IFN-β, IRF8, batf3 E2-2, IRF4, and/or Notch2 KLF4. IFN-α proteins are produced mainly by plasmacytoid dendritic cells (pDCs). They are mainly involved in innate immunity against viral infection. The genes responsible for their synthesis come in 13 subtypes that are called IFN-α1, IFN-α2, IFN-α4, IFN-α5, IFN-α6, IFN-α7, IFN-α8, IFN-α10, IFN-α13, IFN-α14, IFN-α16, IFN-α17, and IFN-α21. These genes are found together in a cluster on chromosome 9. IFN-α is also made synthetically as a medication for hairy cell leukemia. The International Nonproprietary Name (INN) for the product is interferon alpha. The recombinant type is interferon alpha-1. The pegylated types of IFNs are pegylated interferon alpha-2a and pegylated interferon alpha-2b. The IFN-α proteins are produced in large quantities by fibroblasts. They have an antiviral activity that is involved mainly in innate immune response. Two types of IFN-α have been described, IFN-β1 (IFNB1) and IFN-β3 (IFNB3)(the gene designated IFN-β2 is actually IL-6). IFN-β1 is used as a treatment for multiple sclerosis as it reduces the relapse rate. IFN-β1 is not an appropriate treatment for patients with progressive, non-relapsing forms of multiple sclerosis. IFN-ε, -κ, -τ, -δ and -ζ, IFN-ε, -κ, -τ, and -ζ appear, at this time, to come in a single isoform in humans, IFN-κ. Ruminants encode IFN-τ, a variant of IFN-ω. So far, IFNζ is only found in mice, while a structural homolog, IFN-δ is found in a diverse array of non-primate and non-rodent placental mammals. Most but not all placental mammals encode functional IFN-ε and IFN-κ genes. IFN-ω, although having only one functional form described to date (IFN-ω1), has several pseudogenes: IFN-ωP2, IFN-ωP4, IFN-ωP5, IFN-ωP9, IFN-ωP15, IFN-ωP18, and IFN-ωP19 in humans. Many non-primate placental mammals express multiple IFN-ω subtypes. IFN-ν, a subtype of type I IFN, was recently described as a pseudogene in humans, but potentially functional in the domestic cat genome. In all other genomes of non-feline placental mammals, IFN-ν is a pseudogene; in some species, the pseudogene is well preserved, while in others, it is badly mutilated or is undetectable. Moreover, in the cat genome, the IFN-ν promoter is deleteriously mutated. It is likely that the IFN-ν gene family was rendered useless prior to mammalian diversification. Its presence on the edge of the type I IFN locus in mammals may have shielded it from obliteration, allowing its detection.

[0139] In embodiments, expression of the one or more therapeutic agents may be regulated by an inducible expression system. The inducible expression system allows for a temporal and spatial controlled activation and/or expression of genes. For example, Tetracycline-Controlled Transcriptional Activation is a method of inducible gene expression where transcription is reversibly turned on or off in the presence of the antibiotic tetracycline or one of its derivatives (e.g., doxycycline). For example, an inducible suicide gene expression system allows for a temporal and spatial controlled activation and/or expression of a suicide gene, which causes a cell to kill itself through apoptosis.

[0140] In embodiments, the modified cells comprise a nucleic acid sequence encoding a reverse tetracycline transactivator (rtTA). In embodiments, expression of the one or more therapeutic agents is regulated by the rtTA, such that the one or more therapeutic agents are expressed in the presence of tetracycline. In embodiments, a concentration of tetracycline in the cell culture medium is not less than about 2 μg/ml. In embodiments, the tetracycline is selected from the group consisting of tetracycline, demeclocycline, meclocycline, doxycycline, lymecycline, methacycline, minocycline, oxytetracycline, rolitetracycline, and chlortetracycline. In embodiments, the tetracycline is doxycycline.

[0141] In embodiments, the inducible suicide system is an HSV-TK system or an inducible caspase-9 system. In embodiments, the modified cells comprise a nucleic acid sequence encoding a suicide gene, such that when the modified cells are in the presence of a nucleoside analogue in a manner permitting expression of the suicide gene, to render the nucleoside analogue cytotoxic to the modified cells. In embodiments, the suicide gene is selected from the group consisting of thymidine kinase of herpes simplex virus, thymidine kinase of varicella zoster virus, and bacterial cytosine deaminase. In embodiments, the suicide gene is thymidine kinase of herpes simplex virus. In embodiments, the nucleoside analogue is selected from the group consisting of ganciclovir, acyclovir, buciclovir, famciclovir, penciclovir, valciclovir, trifluorothymidine, 1-[2-deoxy, 2-fluoro, beta-D-arabino furanosyl]-5-iodouracil, ara-A, araT 1-beta-D-arabinofuranoxyl thymine, 5-ethyl-2′-deoxyuridine, 5-iodo-5′-amino-2,5′-dideoxyuridine, idoxuridine, AZT, AIU, dideoxycytidine, and AraC. In embodiments, the nucleoside analogue is ganciclovir.

[0142] In embodiments, the CAR comprises an extracellular domain, a transmembrane domain, and an intracellular domain, and the extracellular domain binds an antigen. In embodiments, the CAR binds tMUC 1, PRLR, CLCA1, MUC12, GUCY2C, GPR35, CR1L, MUC 17, TMPRSS11B, MUC21, TMPRSS11E, CD207, SLC30A8, CFC1, SLC12A3, SSTR1, GPR27, FZD10, TSHR, SIGLEC15, SLC6A3, KISS1R, QRFPR, GPR119, CLDN6, UPK2, ADAM12, SLC45A3, ACPP, MUC21, MUC16, MS4A12, ALPP, CEA, EphA2, FAP, GPC3, IL13-Rα2, Mesothelin, PSMA, ROR1, VEGFR-II, GD2, FR-α, ErbB2, EpCAM, EGFRvIII, PSCA, or EGFR. In embodiments, the intracellular domain comprises a co-stimulatory domain that comprises an intracellular domain of a co-stimulatory molecule selected from the group consisting of CD27, CD28, 4-1BB, OX40, CD30, CD40, PD-1, ICOS, lymphocyte function-associated antigen-1 (LFA-1), CD2, CD7, LIGHT, NKG2C, B7-H3, and any combination thereof. In embodiments, the antigen is Epidermal growth factor receptor (EGFR), Variant III of the epidermal growth factor receptor (EGFRvIII), Human epidermal growth factor receptor 2 (HER2), Mesothelin (MSLN), Prostate-specific membrane antigen (PSMA), Carcinoembryonic antigen (CEA), Disialoganglioside 2 (GD2), Interleukin-13Ra2 (IL13Rα2), Glypican-3 (GPC3), Carbonic anhydrase IX (CAIX), L1 cell adhesion molecule (L1-CAM), Cancer antigen 125 (CA125), Cluster of differentiation 133 (CD133), Fibroblast activation protein (FAP), Cancer/testis antigen 1B (CTAG1B), Mucin 1 (MUC1), Folate receptor-α (FR-α), CD19, FZD10, TSHR, PRLR, Muc 17, GUCY2C, CD207, CD3, CD5, B-Cell Maturation Antigen (BCMA), or CD4.

[0143] In embodiments, the therapeutic agent is present in the modified T cell in a recombinant DNA construct, in an mRNA, or in a viral vector. In embodiments, the modified T cell comprises a polynucleotide comprising a promoter comprising a binding site for a transcription modulator that modulates the expression and/or secretion of the therapeutic agent in the modified cell. In embodiments, the transcription modulator is or comprises Hif1a, NFAT, FOXP3, or NFkB. In embodiments, the promoter is responsive to the transcription modulator. In embodiments, the promoter is operably linked to the polynucleotide encoding the therapeutic agent such that the promoter drives expression and/or secretion of the therapeutic agent. In embodiments, the promoter comprises at least one of SEQ ID NOs: 323-325.

[0144] In embodiments, the CAR and the therapeutic agent are produced in the form of a polyprotein, which is cleaved to generate separate CAR and therapeutic agent molecules, and there is a cleavable moiety between the CAR and the therapeutic agent, the cleavable moiety comprises a 2A peptide, the 2A peptide comprises P2A or T2A.

[0145] In embodiments, the modified T cell comprises an additional (second) CAR, the CAR binds a solid tumor antigen, and the additional CAR binds an antigen of a white blood cell. In embodiments, the solid tumor antigen is tMUC 1, PRLR, CLCA1, MUC12, GUCY2C, GPR35, CR1L, MUC 17, TMPRSS11B, MUC21, TMPRSS11E, CD207, SLC30A8, CFC1, SLC12A3, SSTR1, GPR27, FZD10, TSHR, SIGLEC15, SLC6A3, KISS1R, QRFPR, GPR119, CLDN6, UPK2, ADAM12, SLC45A3, ACPP, MUC21, MUC16, MS4A12, ALPP, CEA, EphA2, FAP, GPC3, IL13-Rα2, Mesothelin, PSMA, ROR1, VEGFR-II, GD2, FR-α, ErbB2, EpCAM, EGFRvIII, PSCA, or EGFR, and the antigen of the white blood cell is CD19, CD20, CD22, or BCMA. In embodiments, the modified cell comprises a dominant negative form of PD-1.

[0146] Embodiments relate to an isolated nucleic acid comprising a polynucleotide and an additional polynucleotide, the nucleic acid encoding a chimeric antigen receptor (CAR), the additional nucleic acid encoding a therapeutic agent that comprises at least one of TNFRSF superfamily member receptor activation antibodies or membrane-bound forms thereof, TNFRSF superfamily member ligands or the membrane-bound form thereof, chemokines or membrane-bound forms thereof, antibodies to the chemokines, or antibodies to receptors of the chemokines or the membrane-bound forms thereof, and D28 family's ligands that correspond to the sequences in Table 2-4. For example, TNFRSF superfamily member receptor includes tumor necrosis factor receptor 1, Tumor necrosis factor receptor 2, Lymphotoxin beta receptor, Lymphotoxin beta receptor, CD40, Fas receptor, Decoy receptor 3, CD27, CD30, 4-1 BB, Death receptor 4, Death receptor 5, Decoy receptor 1, Decoy receptor 2, RANK, Osteoprotegerin, TWEAK receptor, TACI, BAFF receptor, Herpesvirus entry mediator, Nerve growth factor receptor, B-cell maturation antigen, Glucocorticoid-induced TNFR-related, TROY, Death receptor 6, Death receptor 3, Ectodysplasin A2 receptor, and the like.

[0147] In embodiments, the therapeutic agent includes an antibody reagent (e.g., a single-chain antibody (e.g., scFv), a single domain antibody (e.g., a camelid antibody), or a bispecific antibody reagent (e.g., a bispecific T cell engager (BiTE)). In embodiments, the therapeutic agent includes a cytokine. Examples of the cytokines include IL-1P, IL-2, IL-4, IL-5, IL-6, IL-8, IL-10, IL-12, IL-13, IL-15, IL-17, IL-1Ra, IL-2R, IFN-γ, IFN-y, MIP-In, MIP-IP, MCP-1, TNFα, GM-CSF, GCSF, CXCL9, CXCL10, CXCR factors, VEGF, RANTES, EOTAXIN, EGF, HGF, FGF-P, CD40, CD40L, ferritin, and any combination thereof. In embodiments, the cytokines include proinflammatory cytokines such as IFN-γ, IL-15, IL-4, IL-10, TNFα, IL-8, IL-5, IL-6, GM-CSF, and MIP-Iα. For example, IFN-γ has been approved by the FDA to treat patients with malignant osteoporosis (e.g., Journal of Pediatrics 121(1):119-24-August 1992).

[0148] The present disclosure describes a population of CAR cells comprising the nucleic acid and the additional nucleic acid, wherein the CAR cells comprise lymphocyte, leukocyte, or peripheral blood mononuclear cell (PBMC). In embodiments, the CAR and the therapeutic agent are produced in the form of a polyprotein, which is cleaved to generate separate CAR and therapeutic agent molecules. In embodiments, the polyprotein comprises a cleavable moiety between the CAR and the therapeutic agent, the cleavable moiety comprising a 2A peptide, the 2A peptide comprises P2A or T2A. In embodiments, the CAR and the therapeutic agent are each constitutively expressed. In embodiments, the CAR cells comprise: a third polynucleotide encoding an additional CAR binding to an antigen that is different from the CAR, or the additional CAR binding a solid tumor antigen, and the CAR binds an antigen of a white blood cell. In embodiments, the therapeutic agent or its variants can be produced either recombinantly or synthetically. For synthetic production of the therapeutic agent, an automated synthesizer can be used. For recombinant production of the therapeutic agent, a suitable plasmid containing polynucleotide that encodes the therapeutic agent can be introduced into a suitable host cell, either eukaryotic, such as yeast, plant, insect or mammalian cells, or prokaryotic, such as E. coli. Polynucleotides encoding the therapeutic agent of interest can be made by routine manipulations such as ligation of polynucleotides. The resultant therapeutic agent can be isolated using standard protein purification techniques known in the art.

[0149] The present disclosure describes a pharmaceutical composition comprising the population of the CAR cells. Embodiments relate to a method of inducing or enhancing T cell response in a subject in need thereof and/or treating a tumor of the subject, the method comprising administering an effective amount of the composition to the subject.

[0150] The present disclosure describes a modified cell comprising one or more CARs, wherein the cell is engineered to express and secrete one or more therapeutic agents comprising at least one of IL-2, IL-6, IL-7, IL-15, IL-17, and IL-23. In embodiments, the cell is engineered to express the therapeutic agent, which is bound to the membrane of the modified cell.

[0151] Modified T cells can be derived from a stem cell. The stem cells can be adult stem cells, embryonic stem cells, more particularly non-human stem cells, cord blood stem cells, progenitor cells, bone marrow stem cells, induced pluripotent stem cells, totipotent stem cells or hematopoietic stem cells. A modified cell can also be a dendritic cell, a NK-cell, a B-cell or a T cell selected from the group consisting of inflammatory T-lymphocytes, cytotoxic T-lymphocytes, regulatory T-lymphocytes or helper T-lymphocytes. In another embodiment, Modified cells can be derived from the group consisting of CD4+T-lymphocytes and CD8+T-lymphocytes. Prior to expansion and genetic modification of the cells of the invention, a source of cells can be obtained from a subject through a variety of non-limiting methods. T cells can be obtained from a number of non-limiting sources, including peripheral blood mononuclear cells, bone marrow, lymph node tissue, cord blood, thymus tissue, tissue from a site of infection, ascites, pleural effusion, spleen tissue, and tumors. In embodiments, any number of T cell lines available and known to those skilled in the art, can be used. In embodiments, modified cells can be derived from a healthy donor, from a patient diagnosed with cancer or from a patient diagnosed with an infection. In embodiments, modified cell is part of a mixed population of cells which present different phenotypic characteristics.

[0152] The term “stem cell” refers to any of certain type of cells which have the capacity for self-renewal and the ability to differentiate into other kinds of cells. For example, a stem cell gives rise either to two daughter stem cells (as occurs in vitro with embryonic stem cells in culture) or to one stem cell and a cell that undergoes differentiation (as occurs e.g. in hematopoietic stem cells, which give rise to blood cells). Different categories of stem cell may be distinguished on the basis of their origin and/or the extent of their capacity for differentiation into other types of cell. For example, stem cell may include embryonic stem (ES) cells (i.e., pluripotent stem cells), somatic stem cells, Induced pluripotent stem cells, and any other types stem cells.

[0153] The pluripotent embryonic stem cells may be found in the inner cell mass of a blastocyst and have high innate capacity for differentiation. For example, pluripotent embryonic stem cells may have the potential to form any type of cell in the body. When grown in vitro for long periods of time, ES cells maintain pluripotency: progeny cells retain the potential for multilineage differentiation.

[0154] Somatic stem cells include the fetal stem cells (from the fetus) and adult stem cells (found in various tissues, such as bone marrow). These cells have been regarded as having a capacity for differentiation lower than that of the pluripotent ES cells—with the capacity of fetal stem cells being greater than that of adult stem cells; they apparently differentiate into only a limited types of cells and have been described as multipotent. The ‘tissue-specific’ stem cells normally give rise to only one type of cell. For example, embryonic stem cells may be differentiated into blood stem cells (e.g., Hematopoietic stem cells (HSCs)), which may be further differentiated into various blood cells (e.g., red blood cells, platelets, white blood cells).

[0155] Induced pluripotent stem cells (i.e., iPS cells or iPSCs) may include a type of pluripotent stem cell artificially derived from a non-pluripotent cell (e.g., an adult somatic cell) by inducing an expression of specific genes. Induced pluripotent stem cells are similar to natural pluripotent stem cells, such as embryonic stem (ES) cells, in many aspects, such as the expression of certain stem cell genes and proteins, chromatin methylation patterns, doubling time, embryoid body formation, teratoma formation, viable chimera formation, and potency and differentiability. Induced pluripotent cells can be made from adult stomach, liver, skin cells, and blood cells.

[0156] The present disclosure describes a method of causing or enhancing T cell response, treating cancer, or enhancing cancer treatment, the method comprising: administrating an effective amount of the composition of T cells comprising one or more CARs, wherein the cell is engineered to express and secrete a therapeutic agent that is or comprises at least one of IL-2, IL-6, IL-7, IL-12, IL-15, IL-17, and IL-23, and the T cell response is enhanced as compared to the administration of T cells that do not express or secrete the therapeutic agent. In embodiments, the composition of T cells may include one or more CARs and can be engineered to express and secrete IL-6 and IFNγ. In other embodiments, the T cells can be engineered to express and secrete IL-12. In other embodiments, the T cells can be engineered to express and secrete IL-15. It has been reported that patients with IL-15 administered at 0.3 mcg/kg/day were concurrent with a maximum of 50-fold elevations of circulating IL-6 and IFNγ concentrations.

[0157] The present disclosure describes a method of causing or enhancing T cell response, treating cancer, or enhancing cancer treatment, the method comprising: administering an effective amount of a composition comprising a population of T cells comprising a CAR; and administering an effective amount of a therapeutic agent comprising at least one of IFNγ, IL-2, IL-6, IL-7, IL-12, IL-15, IL-17, and IL-23, wherein the T cell response is enhanced as compared to the administration of CAR T cells without the administration of therapeutic agent. In embodiments, the therapeutic agent may be isolated, synthetic, native, or recombinant cytokines. The therapeutic agent comprises recombinant IFNγ, IL-2, IL-6, IL-7, IL-12, IL-15, IL-17, and/or IL-23. In embodiments, the recombinant cytokine is a recombinant human cytokine. In embodiments, the administering may be implemented by intravenous or subcutaneous injection. In embodiments, administering an effective amount of the therapeutic agent comprises intravenous delivery of an amount of IL-6 in the range of about 0.5-50 ug per kilogram of body weight. In embodiments, the therapeutic agent is IL-6 or IL-7. Recombinant IL-15 can be administered as a daily bolus infusion for a predetermined time or days at 3 mcg/kg/day and 1 mcg/kg/day. Recombinant IFNγ can be administered at a dose of 2 million units daily for 5 days per week over a predetermined time. In embodiments, administering the effective amount of the therapeutic agent comprises administering an effective amount of the therapeutic agent such that concentrations of the cytokines, such as IL-6 and/or IFN-γ, in the blood of the subject may increase 5-1000 times (e.g., 50 times). Methods of administering of IL-6, IL-15, and/or IFNγ can be found in U.S. Patent Application NO: U.S. Pat. No. 5,178,856A and Cytokines in the Treatment of Cancer, Volume 00, Number 00, 2018 of Journal of Interferon & Cytokine Research, which are incorporated herein by reference in their entirety. In embodiments, recombinant IL-12 can be administered at 30 ng/kg as a starting dose and escalated to 500 ng/kg twice weekly after the infusion of CAR T cells. Methods of administering of IL-12 can be found in Leuk Res. 2009 November; 33(11): 1485-1489, which is incorporated here by reference. In embodiments, the therapeutic agent can be administered to the subject starting from 0, 1, 2, 3, 4, 5, 6, 7, 8, 9, 10, 11, 12, 13, 14, 15, 16, 17, 18, 19, 20, 21, 22, 23, 24, 25, 26, 27, 28, 29, or 30 days after the infusion of the CAR T cells. In embodiments, the therapeutic agent can be administered to the subject between 0 and 7 days after the infusion of the CAR T cells. Sequences of examples of the recombinant cytokines can be found in Table 2.

[0158] In embodiments, the composition comprising a population of T cells described herein can comprise one or more CAR molecules. The CAR molecules can have different antigen binding domains. In embodiments, the population of T cells in the composition includes T cells comprising different CAR molecules. In embodiments, a single T cell can comprise a single CAR molecule or at least two different CAR molecules. In embodiments, a single T cell can comprise a single CAR with at least two different antigen binding domains, for example, a bispecific CAR. In embodiments, the population of T cells includes a mix of different T cells including one or more CAR molecules and/or a CAR molecule including one or more antigen binding sites.

[0159] In embodiments, the method further comprises monitoring a concentration of the therapeutic agent in tissue or blood of the subject; and administering an antagonist of receptors of the therapeutic agent or the therapeutic agent (e.g., antibodies) if the concentration and/or other parameters of the subject are not in a desired condition. For example, the parameters may include a level of body temperatures, a level CRS, and a level of neuronal toxicity.

[0160] In embodiments, the expression and/or secretion of the therapeutic agent may be is regulated by an inducible expression system. In embodiments, the inducible expression system is a rtTA-TRE system, which increases or activates the expression of the therapeutic agent, or a combination thereof. In embodiments, the inducible expression system is the rtTA-TRE system. For example, Tetracycline-Controlled Transcriptional Activation is a method of inducible gene expression where transcription is reversibly turned on or off in the presence of the antibiotic tetracycline or one of its derivatives (e.g., doxycycline). In embodiments, the expression and/or secretion of the therapeutic agent may be regulated by an inducible expression system and/or the modified cell comprises a polynucleotide encoding an inducible suicide system. For example, the inducible suicide system is an HSV-TK system, eEGFR system, or an inducible caspase-9 system.

[0161] In embodiments, the T cell comprises an additional (second) CAR binding an antigen of a WBC, and the first CAR binds an antigen of a solid tumor. In embodiments, the solid tumor antigen is tMUC 1, PRLR, CLCA1, MUC12, GUCY2C, GPR35, CR1L, MUC 17, TMPRSS11B, MUC21, TMPRSS11E, CD207, SLC30A8, CFC1, SLC12A3, SSTR1, GPR27, FZD10, TSHR, SIGLEC15, SLC6A3, KISS1R, QRFPR, GPR119, CLDN6, UPK2, ADAM12, SLC45A3, ACPP, MUC21, MUC16, MS4A12, ALPP, CEA, EphA2, FAP, GPC3, IL13-Rα2, Mesothelin, PSMA, ROR1, VEGFR-II, GD2, FR-α, ErbB2, EpCAM, EGFRvIII, PSCA, or EGFR, and the B cell antigen is CD19, CD20, CD22, or BCMA.

[0162] In embodiments, the CAR comprises an extracellular domain, a transmembrane domain, and an intracellular domain, and the extracellular domain binds an antigen.

[0163] In embodiments, the intracellular domain comprises a co-stimulatory domain that comprises an intracellular domain of a co-stimulatory molecule selected from the group consisting of CD27, CD28, 4-1BB, OX40, CD30, CD40, PD-1, ICOS, lymphocyte function-associated antigen-1 (LFA-1), CD2, CD7, LIGHT, NKG2C, B7-H3, and any combination thereof.

[0164] In embodiments, the antigen is Epidermal growth factor receptor (EGFR), Variant III of the epidermal growth factor receptor (EGFRvIII), Human epidermal growth factor receptor 2 (HER2), Mesothelin (MSLN), Prostate-specific membrane antigen (PSMA), Carcinoembryonic antigen (CEA), Disialoganglioside 2 (GD2), Interleukin-13Ra2 (IL13Rα2), Glypican-3 (GPC3), Carbonic anhydrase IX (CAIX), L1 cell adhesion molecule (L1-CAM), Cancer antigen 125 (CA125), Cluster of differentiation 133 (CD133), Fibroblast activation protein (FAP), Cancer/testis antigen 1B (CTAG1B), Mucin 1 (MUC1), Folate receptor-α (FR-α), CD19, FZD10, TSHR, PRLR, Muc 17, GUCY2C, CD207, CD3, CD5, B-Cell Maturation Antigen (BCMA), or CD4.

[0165] In embodiments, the modified cell or T cells comprise a dominant negative (dn) PD-1 mutant to interfere with PD-1/PDL1 signaling pathway of the cell. For example, the modified cell or T cells comprise a polynucleotide encoding the dominant negative form of PD-1 mutant. In embodiments, the polynucleotide may further include a promoter comprising a binding site for a transcription modulator (e.g., transcription factors) that modulates the expression of the PD-1 mutant in the cell. Examples of the polynucleotide are provided in Tables 2-4. These constructs can be placed into vectors (e.g., lentiviral vectors) either in a forward or reverse direction. In embodiments, examples of the transcription modulator are Hif1a, NFAT, FOXP3, NFkB, and other modulators in Table 2-4.

[0166] In embodiments, the therapeutic agent is present in the modified cell in a recombinant DNA construct, in an mRNA, or in a viral vector. In embodiments, the modified cell comprises a therapeutic agent mRNA encoding the therapeutic agent, and the mRNA is not integrated into the genome of the modified cell. In embodiments, the therapeutic agent mRNA may be introduced (e.g., electroporated) into the modified cell such that the expression and/or secretion of the therapeutic agent is transient. Synthetic mRNAs can be injected to achieve transient gene expression. For example, the therapeutic agent supplied by the mRNA is short-lived such that the release of the therapeutic agent is controllable, especially for proinflammatory cytokines such as IFN-γ, IL-4, IL-10, TNFα, IL-8, IL-5, IL-6, GM-CSF, and MIP-Iα.

[0167] In embodiments, the therapeutic agent comprises or is at least one listed in Table 2. In embodiments, the therapeutic agent comprises or has the sequence listed in Table 2.

[0168] In embodiments, the modified cell includes a polynucleotide comprising the isolated nucleic acids described herein, wherein the isolated nucleic acid includes a promoter comprising a binding site for a transcription modulator (e.g., transcription factors) that modulates the expression of the therapeutic agent in the cell. Examples of the isolated polynucleotide are provided in Table 2-4. These constructs may be placed into vectors (e.g., lentiviral vectors) either in a forward or reverse direction. In embodiments, the transcription modulator includes Hif1a, NFAT, FOXP3, and/or NFkB. In embodiments, the promoter is responsive to the transcription modulator. In embodiments, the promoter is operably linked to the polynucleotide encoding the therapeutic agent, such that the promoter drives the expression of the therapeutic agent in the cell. In embodiments, the therapeutic agent is ligated to a specific promoter such as to induce the expression of the therapeutic agent in a desired condition. The promoter is divided into two parts, a specific regulatory region containing a transcription factor binding site, plus a minimal promoter. In embodiments, the promoter and the binding site includes the sequences listed in Table 2-4. More information about NFAT may be found at WO2018006882, which is incorporated herein by reference. In embodiments, the transcription modulator can include Stat5 response element, (activated by cytokines such as IL2, IL3, IL7, IL15, and the transcription factor associated with it is STAT5), Stat3 response element, (activated by cytokines such as IL6, transcription factor is STAT3), Interferon Stimulated Response Element, (activated by IFN-α, transcription factors are STAT1 and STAT2), AP1 Response Element, (activated by MAPK/JNK pathway, transcription factor is AP1), SMAD Binding Element (activated by TGF-β, transcription factors are SMAD3 and SMAD4), Serum Response Element (activated by MAP/ERK pathway, transcription factor is Elk1/SRF), Serum Response Factor Response Element (activated by the RhoA pathway, the transcription factor is SRF), Cyclic AMP response element (activated by cAMP/PKA pathway, transcription factor is CREB), or TCF-LEF Response Element (activated by Wnt pathway, transcription factor is TCF-LEF).

[0169] Embodiments relate to an isolated polynucleotide comprising a (first) nucleic acid and an additional (second) polynucleotide, the first nucleic acid encoding a chimeric antigen receptor (CAR), the second nucleic acid encoding a therapeutic agent. For example, the therapeutic agent comprises IL-6 or IFN-γ, or a combination thereof. For example, the therapeutic agent comprises IL-15 or IL-12, or a combination thereof. Embodiments relate to a population of CAR cells comprising the isolated nucleic acid, wherein the CAR cells comprise lymphocyte, leukocyte, or PBMC. In embodiments, the population of CAR cells comprises the CAR and the therapeutic agent produced in the form of a polyprotein, which is cleaved to generate separate CAR and therapeutic agent molecules. In embodiments, the polyprotein comprises a cleavable moiety between the CAR and the therapeutic agent, and the cleavable moiety comprises a 2A peptide, the 2A peptide comprising P2A or T2A. In embodiments, the CAR and the therapeutic agent are each constitutively expressed. In embodiments, the CAR cells comprise: a third polynucleotide encoding a second CAR binding to an antigen that is different from the first CAR. In embodiments, the second CAR binds a solid tumor antigen, and the first CAR binds an antigen of a white blood cell.

[0170] Embodiments relate to a pharmaceutical composition comprising the population of the cells including one or more CAR molecules (the CAR cells) and one or more therapeutic agents. Embodiments also relate to a method of inducing or causing T cell response in a subject in need thereof, the method comprising administering an effective amount of the pharmaceutical composition described herein to the subject. In embodiments, the CAR cell or the modified cell is a T cell, an NK cell, a macrophage, or a dendritic cell. In embodiments, the CAR cell or the modified cell is a T cell.

[0171] In embodiments, the additional (second) nucleic acid comprises two nucleic acids, one encoding IL6, and one encoding IFN-γ, and the two nucleic acids are connected by an IRES element or another nucleic acid encoding a 2A peptide. In embodiments, the additional (second) nucleic acid comprises the polynucleotide of SEQ ID NOs: 287 or 328, or a combination thereof. In embodiments, expression of the additional (second) nucleic acid is regulated by a conditional expression system such that the therapeutic agent is expressed in response to the binding of a target antigen. In embodiments, the expression of the additional polynucleotide is regulated by SynNotch polypeptide.

[0172] Embodiments relate to an FC fusion protein associated with a small protein (e.g., a cytokine) as described herein. In embodiments, the therapeutic agent may comprise the FC fusion protein. For example, cytokines such as IL15, IFN-γ or IL6 may be linked to one or more immunoglobin Fc domains. In embodiments, the Fc domain folds independently and may improve the solubility and stability of the small protein both in vitro and in vivo. In embodiments, the Fc region allows for easy cost-effective purification by protein-G/A affinity chromatography during manufacture. In embodiments, the FC fusion protein may be modified to polymerize into well-defined complexes containing multiple small proteins. In embodiments, the fusion protein may be expressed and secreted by the modified cell (e.g., a CAR T cell), which is used to treat a subject with cancer and/or other diseases. In embodiments, administration of the fusion protein may be combined with the treatment of CAR T cells expressing and secreting the fusion protein. For example, a method for enhancing T cell response and/or treating a subject with cancer or other diseases may comprise administrating a fusion protein associated with the small protein (e.g., IFN-γ) to a subject and administrating an effective amount of the composition of a population of T cells comprising a CAR and expressing as well as secreting the fusion protein associated with the small protein to the subject. In embodiments, the administration of the fusion protein may enhance the expansion of the CAR T cells during the early stage of the CAR T treatment (e.g., 1, 2, 3, 4, 5, or 6 days after the infusion of the CAR T cells). For example, the fusion protein may be administrated into the subject 1, 2, 3, 4, 5, or 6 days after the infusion of the CAR T cells. In embodiments, the method may comprise administrating a fusion protein associated with the small protein (e.g., IFN-γ) to a subject and administrating an effective amount of the composition of a population of T cells comprising a CAR without expressing or secreting the fusion protein associated with the small protein to the subject. For example, the fusion protein may be administrated into the subject for a predetermined time. More information about the FC fusion protein may be found at J Immunol 2004; 172:2925-2934 and EMBO Mol Med. 2012 October; 4(10): 1015-1028, which are incorporated by reference. More information about administration of the therapeutic agent (e.g. cytokines) may be found at J Interferon Cytokine Res. 2019 January; 39(1):6-21, which is incorporated by reference.

[0173] Embodiments relate to a modified cell comprising one or more CARs, wherein the cell is engineered to express and secrete one or more therapeutic agents. For example, the therapeutic agent comprises IL-6 or IFN-γ, or a combination thereof. Embodiments relate to a method of inducing or enhancing T cell response, treating cancer, or enhancing cancer treatment, the method comprising: administrating an effective amount of the pharmaceutical composition of T cells comprising one or more CARs, wherein the cell is engineered to express and secrete one or more therapeutic agents. For example, the therapeutic agent comprises IL-6 or IFN-γ, or a combination thereof. In embodiments, the therapeutic agent is a small protein associated with IL-6 or IFN-γ. For example, the administration of IL-15 to a subject may increase concentrations of IL-6 and IFN-γ up to 50-fold in the blood of the patient. Embodiments relate to a method of causing or enhancing T cell response, treating cancer, or enhancing cancer treatment, the method comprising: administering an effective amount of the composition of a population of T cells comprising a CAR and administering an effective amount of a therapeutic agent. For example, a therapeutic agent comprises IL-6 or IFN-γ, or a combination thereof. In embodiments, the CAR cells, the modified cell, the cell is a T cell, an NK cell, a macrophage or a dendritic cell. For example, the CAR cells, the modified cell, the cell is a T cell. Embodiments relate to a method for enhancing T cell response and/or treating a subject with cancer, or other diseases may comprise administrating a therapeutic agent (e.g., a recombinant or native IFN-γ) to a subject and administrating an effective amount of a composition comprising a population of T cells comprising a CAR and expressing as well as secreting one or more therapeutic agents in the subject. In embodiments, the therapeutic agent may enhance the expansion of the CAR T cells during the early stage of the CAR T treatment (e.g., 1, 2, 3, 4, 5, or 6 days after the infusion of the CAR T cells). For example, the therapeutic agent may be administrated into the subject 1, 2, 3, 4, 5, or 6 days after the infusion of the CAR T cells. In embodiments, the method may comprise administrating a therapeutic agent to a subject and administrating an effective amount of the composition of a population of T cells comprising a CAR without expressing or secreting the therapeutic to the subject. For example, the therapeutic agent may be administrated into the subject for a predetermined time. In embodiments, the therapeutic agent may be modified such that the biological and/or pharmacological properties of the therapeutic agent may be enhanced. For example, the hybrid FC fusion technology may be implemented to the solubility and/or stability of an active ingredient of the therapeutic agent.

[0174] In embodiments, the therapeutic agent may be isolated, synthetic, native, or recombinant human cytokines. For example, Recombinant human IL-15 may be administered as a daily bolus infusion for predetermined time days at 3 mcg/kg/day and 1 mcg/kg/day. Recombinant human IFN-γ may be administered at a dose of 2 million units daily for 5 days per week over a predetermined time. In embodiments, the administering the effective amount of the therapeutic agent comprises administering an effective amount of the therapeutic agent such that concentrations of IL-6 and/or IFN-γ in the blood of the subject may increase 5-1000 times (e.g., 50 times). For example, the therapeutic agent comprises IL-15.

[0175] In embodiments, T cell response is enhanced as compared to the administration of T cells that do not express or secrete the therapeutic agent, or the T cell response is enhanced as compared to the administration of CAR T cells without the administration of the therapeutic agent.

[0176] In embodiments, expression and/or secretion of the therapeutic agent is regulated by an inducible expression system and/or the modified cell comprises a polynucleotide encoding an inducible suicide system. In embodiments, the inducible expression system is the rtTA-TRE system. In embodiments, the inducible suicide system is an HSV-TK system or an inducible caspase-9 system.

[0177] In embodiments, the modified T cells express and/or secrete the one or more therapeutic agents in response to the activation of the modified T cells. Such conditional expression and/or secretion may be implemented in various manners. The expression and/or secretion of the one or more therapeutic agents in the modified cell may be modulated by a transcription modulator (e.g., NFAT). TRUCKs (T cells redirected for universal cytokine killing), CAR-redirected T cells, may be used to express and/or secrete the one or more therapeutic agents when these T cells are activated. The expression and/or secretion of the one or more therapeutic agents in the modified cell may also be regulated by a SynNotch polypeptide.

[0178] In embodiments, a range of concentration values of IL6 is 60 to 5000 μg/ml, 200-5000 pg/ml, or 2000-5000 pg/ml in the blood of the subject. In embodiments, a range of concentration values IFN-γ is 20 to 5000 pg/ml, 200 to 5000 pg/ml, or 500 to 5000 pg/ml in the blood of the subject. In embodiments, the administering an effective amount of the therapeutic agent comprises intravenous delivery of an amount of human IL-6 in the range of about 0.5-50 ug per kilogram of body weight. More detailed information about IFN-γ clinical uses may be found at Cancer Med. 2018, 7:4509-4516, which is incorporated by reference.

[0179] In embodiments, the modified cell expresses the therapeutic agent such that concentrations of IL-6 and/or IFN-γ in the blood of the subject may increase 5-1000 times (e.g., 50 times). For example, the therapeutic agent comprises IL-15. It was reported that transgenic expression of IL15 improved anti-glioma activity of anti-IL13Rα2 CAR T cells but cause loss variants such that expression of IL13Rα2 expression was downregulated. As a result, gliomas recurred after the initial response of anti-IL13Rα2 CAR T cells. In embodiments, the modified cells comprise a first group of modified cells engineered to express anti-CD19 CAR and IL-15 and a second group of modified cells engineered to express CAR binding a solid tumor antigen. A pharmaceutical composition comprising the modified cells may be administered to a subject to treat the subject's solid tumor. In this instance, anti-CA19 CAR cells (e.g., T cells) are used to enhance activation/expansion of anti-solid tumor antigen CAR cells (e.g., T cells) at least at the early stage of the treatment. Downregulation of CD19 antigen may have minimal or little impact on treatment of the solid tumor using the anti-solid tumor antigen CAR cells. Thus, a combination of expression of IL-15 and the pharmaceutical composition comprising multiple types of modified cells may improve immunotherapy as compared to conventional treatment of CAR T cells expressing IL-15. In embodiments, IL-15 expression by the anti-CA19 CAR can be regulated by various methods described in the present disclosure.

[0180] In embodiments, the modified cells or the T cells comprise an additional (second) CAR binding an antigen of a WBC, and the CAR binds an antigen of a solid tumor. In embodiments, the solid tumor antigen is tMUC 1, PRLR, CLCA1, MUC12, GUCY2C, GPR35, CR1L, MUC 17, TMPRSS11B, MUC21, TMPRSS11E, CD207, SLC30A8, CFC1, SLC12A3, SSTR1, GPR27, FZD10, TSHR, SIGLEC15, SLC6A3, KISS1R, QRFPR, GPR119, CLDN6, UPK2, ADAM12, SLC45A3, ACPP, MUC21, MUC16, MS4A12, ALPP, CEA, EphA2, FAP, GPC3, IL13-Rα2, Mesothelin, PSMA, ROR1, VEGFR-II, GD2, FR-α, ErbB2, EpCAM, EGFRvIII, PSCA, or EGFR, and the B cell antigen is CD19, CD20, CD22, or BCMA.

[0181] In embodiments, the modified cells or the T cells comprise a dominant negative form of PD-1. In embodiments, the modified cell or the T cells comprise a modified PD-1 lacking a functional PD-1 intracellular domain.

[0182] In embodiments, the CAR comprises an extracellular domain, a transmembrane domain, and an intracellular domain, and the extracellular domain binds an antigen. In embodiments, the intracellular domain comprises a co-stimulatory domain that comprises an intracellular domain of a co-stimulatory molecule selected from the group consisting of CD27, CD28, 4-1BB, OX40, CD30, CD40, PD-1, ICOS, lymphocyte function-associated antigen-1 (LFA-1), CD2, CD7, LIGHT, NKG2C, B7-H3, and one combination thereof. In embodiments, the antigen is Epidermal growth factor receptor (EGFR), Variant III of the epidermal growth factor receptor (EGFRvIII), Human epidermal growth factor receptor 2 (HER2), Mesothelin (MSLN), Prostate-specific membrane antigen (PSMA), Carcinoembryonic antigen (CEA), Disialoganglioside 2 (GD2), Interleukin-13Ra2 (IL13Rα2), Glypican-3 (GPC3), Carbonic anhydrase IX (CAIX), L1 cell adhesion molecule (L1-CAM), Cancer antigen 125 (CA125), Cluster of differentiation 133 (CD133), Fibroblast activation protein (FAP), Cancer/testis antigen 1B (CTAG1B), Mucin 1 (MUC1), Folate receptor-α (FR-α), CD19, FZD10, TSHR, PRLR, Muc 17, GUCY2C, CD207, CD3, CD5, B-Cell Maturation Antigen (BCMA), or CD4.

[0183] In embodiments, the therapeutic agent is present in the modified cell in a recombinant DNA construct, in an mRNA, or in a viral vector. In embodiments, the modified cell comprises a therapeutic agent mRNA encoding the therapeutic agent, and the mRNA is not integrated into the genome of the modified cell. In embodiments, the modified cell comprises a polynucleotide comprising a promoter which comprises a binding site for a transcription modulator that modulates the expression and/or secretion of the therapeutic agent in the cell. In embodiments, the transcription modulator includes Hif1a, NFAT, FOXP3, and/or NFkB. In embodiments, the promoter is responsive to the transcription modulator. In embodiments, the promoter is operably linked to the polynucleotide encoding the therapeutic agent such that the promoter drives expression and/or secretion of the therapeutic agent in the cell. In embodiments, the promoter comprises at least one of SEQ ID NOs: 323-325.

[0184] In embodiments, the CAR cells, the modified cell, the cell is a T cell, an NK cell, a macrophage, or a dendritic cell. For example, the CAR cells, the modified cell, the cell is a T cell.

[0185] In embodiments, the population of cells described herein is used in autologous CAR T cell therapy. In embodiments, the CAR T cell therapy is allogeneic CAR T cell therapy, TCR T cell therapy, and NK cell therapy.

### CAR Molecules

[0186] In addition to the embodiments described herein, the present disclosure describes isolated nucleic acids encoding at least two different antigen binding domains. In embodiments, there is a first antigen binding domain that binds an antigen on the surface of a WBC, and there is a second antigen binding domain that binds an antigen on a tumor that is different from the antigen on the surface of a WBC. The first antigen binding domain functions to expand the cells that it is introduced into, while the second antigen binding domain functions to inhibit the growth of or kill tumor cells containing the target tumor antigen upon binding to the target antigen. In embodiments, an isolated nucleic acid described herein encodes both the first and second antigen binding domains on the same nucleic acid molecule. In embodiments, the two antigen binding domains are encoded by two separate nucleic acid molecules. For example, a first nucleic acid encodes a first antigen binding domain and a second nucleic acid encodes a second antigen binding domain.

[0187] In embodiments, the present disclosure describes nucleic acids encoding a first antigen binding domain of a binding molecule and a second antigen binding domain of a binding molecule, wherein first antigen binding domain binds a cell surface molecule of a WBC, and the second antigen binding domain binds an antigen different from the cell surface molecule of the WBC. In embodiments, the second binding domain does not bind a B cell marker. In embodiments, the second binding domain includes a ScFv comprising an amino acid sequence of SEQ ID No: 264 or 265. For example, the second antigen binding domain is on a CAR having one of the amino acid sequences of SEQ ID NOs: 271-277.

[0188] In embodiments, the first and second antigen binding domains can be on two different binding molecules (first and second binding molecules) such as a first CAR and a second CAR. As an example, a first CAR includes an extracellular binding domain that binds a marker on the surface of a B cell, and a second CAR includes an extracellular binding domain that binds a target antigen of a tumor cell. In embodiments, the first CAR and second CAR are encoded by different nucleic acids. In embodiments, the first CAR and second CAR are two different binding molecules but are encoded by a single nucleic acid.

[0189] In embodiments, the two different antigen binding domains can be on the same binding molecule, for example on a bispecific CAR, and encoded by a single nucleic acid. In embodiments, the bispecific CAR can have two different scFv molecules joined together by linkers.

[0190] In embodiments, the two different antigen binding domains can be on a CAR and a T cell receptor (TCR) and are encoded by separate nucleic acids. The binding domain of a TCR can target a specific tumor antigen or tumor marker on the cell of a tumor. In embodiments, the TCR binding domain is a TCR alpha binding domain or TCR beta binding domain that targets a specific tumor antigen. In embodiments, the TCR comprises the TCRγ and TCRδ chains or the TCRα and TCRβ chains. The present disclosure also describes vectors including the isolated nucleic acids described herein. In embodiments, a single vector contains the isolated nucleic acid encoding the first CAR and second CAR or TCR. In embodiments, a first vector contains the first nucleic acid encoding a first CAR, and a second vector contains the nucleic acid encoding the second CAR or TCR. In embodiments, the vector comprises a bispecific CAR including at least two antigen binding domains.

[0191] Moreover, the present disclosure describes cells comprising the isolated nucleic acids or vectors described herein. The cells have been introduced with the isolated nucleic acids or vectors described herein and express at least two more binding domains. In embodiments, the cells include two or more different binding domains, a first antigen binding domain, and a second antigen binding domain, wherein the first antigen binding domain binds a cell surface molecule of a WBC, and the second antigen binding domain binds an antigen different from the cell surface molecule of a WBC. Further, the present disclosure describes compositions including a population of the cells described herein. In embodiments, the cells are peripheral blood mononuclear cells (PBMCs) such as lymphocytes. In embodiments, the lymphocytes are T cells, NK cells, or dendritic cells.

[0192] The present disclosure also describes methods of culturing cells described herein. The methods described herein include obtaining a cell comprising a first antigen binding domain and a second antigen binding domain, wherein the first antigen binding domain binds a cell surface molecule of a WBC, and the second antigen binding domain binds an antigen different from the cell surface molecule of the WBC; and culturing the cell in the presence of an agent derived from a cell surface molecule of the WBC or from an antigen to which the second antigen binding domain binds. In embodiments, the agent is an extracellular domain of a cell surface molecule of a WBC.

[0193] The present disclosure describes methods for in vitro cell preparation, wherein the method includes providing cells; introducing one or more nucleic acids encoding a first antigen binding domain and a second antigen binding domain into the cells, wherein the first antigen binding domain binds a cell surface molecule of a WBC, and the second antigen binding domain binds an antigen different from the cell surface molecule of the WBC; and culturing the cells in the presence of an agent derived from the cell surface molecule of the WBC or from an antigen to which the second antigen binding domain binds.

[0194] The present disclosure describes using the prepared cells to enhance T cell expansion in a subject having cancer. In embodiments, the method comprises introducing a plurality of nucleic acids into T cells, the plurality of nucleic acids encoding a chimeric antigen receptor (CAR) binding a solid tumor antigen and encoding a CAR binding a B cell antigen, at least a portion of the T cells comprising the CAR binding the solid tumor antigen and the CAR binding the B cell antigen; and administering an effective amount of the T cells to the subject. The T cell expansion is enhanced, or the number of T cells is increased in the subject as compared to a subject that is administered with T cells comprising the plurality of nucleic acids encoding only one CAR.

[0195] Additionally, the present disclosure describes methods for introducing and/or enhancing lymphocyte (T cell) response in a subject. Embodiments described herein involve a mechanism that expands lymphocytes and a mechanism that relates to binding of an antigen on a CAR to a tumor cell. In embodiments, the first mechanism involves a molecule associated with a signal that is involved in expanding the lymphocytes in a subject, and an additional mechanism involves a molecule associated with a signal directed to binding, inhibiting the growth of, or killing a tumor cell in the subject. For example, the first mechanism includes a CAR binding to an antigen associated with blood, such as blood cells and blood plasma, or non-essential tissues, and the additional mechanism includes a CAR or TCR targeting an antigen associated with the tumor cell. Examples of non-essential tissues include the mammary gland, colon, gastric gland, ovary, blood components, such as WBC, and thyroid. In embodiments, the first mechanism involves a first binding domain of a molecule, and the additional mechanism involves a second domain of a molecule. In embodiments, the first mechanism and the additional mechanism are performed by the same molecule or by separate molecules. In particular embodiments, the mechanism involves a cell expressing an antigen associated with a tumor cell, and the additional mechanism involves a lymphocyte having an antigen binding domain.

[0196] The methods described herein involve lymphocytes including an expansion molecule and a functional molecule. In embodiments, the expansion molecule expands the lymphocytes in a subject, and/or the function molecule inhibits the growth of or kills a tumor cell in the subject. In embodiments, the expansion molecule and the function molecule are on a single CAR molecule, for example, a bispecific CAR molecule. In embodiments, the expansion molecule and the function molecule are on separate molecules, for example, CAR and TCR or two different CARs. The expansion molecule can include a CAR binding to an antigen associated with blood (e.g., blood cells and blood plasma) or non-essential tissues, and the function molecule can include a CAR or TCR targeting an antigen associated with the tumor cell.

[0197] Lymphocyte or T cell response in a subject refers to cell-mediated immunity associated with a helper, killer, regulatory, and other types of T cells. For example, T cell response may include activities such as assisting other WBCs in immunologic processes and identifying and destroying virus-infected cells and tumor cells. T cell response in the subject can be measured via various indicators such as a number of virus-infected cells and/or tumor cells that T cells kill, the amount of cytokine that T cells release in co-culturing with virus-infected cells and/or tumor cells, a level of proliferation of T cells in the subject, a phenotype change of T cells, for example, changes to memory T cells, and a level longevity or lifetime of T cells in the subject.

[0198] In embodiments, the method of enhancing T cell response comprises treating a subject in need thereof, for example, a subject diagnosed with a tumor. The term tumor refers to a mass, which can be a collection of fluid, such as blood, or a solid mass. A tumor can be malignant (cancerous) or benign. Examples of blood cancers include chronic lymphocytic leukemia, acute myeloid leukemia, acute lymphoblastic leukemia, and multiple myeloma.

[0199] Solid tumors usually do not contain cysts or liquid areas. The major types of malignant solid tumors include sarcomas and carcinomas. Sarcomas are tumors that develop in soft tissue cells called mesenchymal cells, which can be found in blood vessels, bone, fat tissues, ligament lymph vessels, nerves, cartilage, muscle, ligaments, or tendon, while carcinomas are tumors that form in epithelial cells, which are found in the skin and mucous membranes. The most common types of sarcomas include undifferentiated pleomorphic sarcoma which involves soft tissue and bone cells; leiomyosarcoma which involves smooth muscle cells that line blood vessels, gastrointestinal tract, and uterus; osteosarcoma which involves bone cells, and liposarcoma which involves fat cells. Some examples of sarcomas include Ewing sarcoma, Rhabdomyosarcoma, chondosarcoma, mesothelioma, fibrosarcoma, fibrosarcoma, and glioma.

[0200] The five most common carcinomas include adrenocarcinoma which involves organs that produce fluids or mucous, such as the breasts and prostate; basal cell carcinoma which involves cells of the outer-most layer of the skin, for example, skin cancer; squamous cell carcinoma which involves the basal cells of the skin; and transitional cell carcinoma which affects transitional cells in the urinary tract which includes the bladder, kidneys, and ureter. Examples of carcinomas include cancers of the thyroid, breast, prostate, lung, intestine, skin, pancreas, liver, kidneys, and bladder, and cholangiocarcinoma.

[0201] The methods described herein can be used to treat a subject diagnosed with cancer. Cancer can be a blood cancer or can be a solid tumor, such as a sarcoma or carcinoma. The method of treating includes administering an effective amount of T cells comprising a first antigen binding domain and a second antigen binding domain to the subject to provide a T-cell response, wherein the first antigen binding domain binds a cell surface molecule of a WBC, and the second antigen binding domain binds an antigen different from the cell surface molecule of the WBC. In embodiments, enhancing the T cell response in the subject includes selectively enhancing proliferation of T cell expressing the first antigen binding domain and the second antigen binding domain in vivo.

[0202] In embodiments, the T cells for enhancing T cell response in a subject includes administering to the subject, T cells comprising a bispecific CAR including two different binding domains or administering T cells comprising a first CAR and a second CAR, wherein the first CAR and the second CAR, each includes a different antigen binding domain.

[0203] In embodiments, methods for enhancing T cell response in a subject include administering a T cell including a CAR molecule and a TCR molecule. The CAR molecule targets or binds a surface marker of a white blood cell, and the TCR molecule binds a marker or an antigen of the tumor that is expressed on the surface or inside the tumor cell.

[0204] The present disclosure describes methods of expanding cells expressing an antigen binding domain in vivo. The method includes administering an effective amount of T cells comprising a first antigen binding domain and a second antigen binding domain to a subject in need thereof, wherein the first antigen binding domain binds a cell surface molecule of a WBC, and the second antigen binding domain binds an antigen different from the cell surface molecule of the WBC. The methods are useful for expanding or increasing the number of T cells, NK cells, dendritic cells.

[0205] In embodiments, the first antigen binding domain is on a first chimeric antigen receptor (CAR) and the second antigen binding domain is on a second CAR or a TCR. For example, the first CAR and the second CAR or TCR include an extracellular antigen binding domain, a transmembrane domain, and a cytoplasmic domain. The cytoplasmic domain of the first CAR includes a co-stimulatory domain and a CD3 zeta domain for transmitting signals for activation of cellular responses. In embodiments, the cytoplasmic domain of the first CAR includes one or more co-stimulatory domains in the absence of a CD3 zeta domain such that activation or stimulation of the first CAR expands WBCs, such as lymphocytes, without introducing and/or activating the killing function of the WBCs. In embodiments, the lymphocytes are T cells.

[0206] In embodiments, the first and second antigen binding domains are on the same CAR (the first CAR), for example, a bispecific CAR with an extracellular antigen binding domain, a transmembrane domain, and a cytoplasmic domain. The extracellular antigen binding domain includes at least two scFvs and at least one of the scFvs functions as a first antigen binding domain for binding a cell surface molecule of a WBC.

[0207] In embodiments, the antigen different from the cell surface molecule of the WBC is CD19, CD22, CD20, BCMA, CD5, CD7, CD2, CD16, CD56, CD30, CD14, CD68, CD11b, CD18, CD169, CD1c, CD33, CD38, CD138, CD13, B7, CAIX, CD123, CD133, CD171, CD171/L1-CAM, CEA, Claudin 18.2, cMet, CS1, CSPG4, Dectin1, EGFR, EGFR vIII, EphA2, ERBB receptors, ErbB T4, ERBB2, FAP, Folate receptor 1, FITC, Folate receptor 1, FSH, GD2, GPC3, HA-1 H/HLA-A2, HER2, IL-11Ra, IL13 receptor a2, IL13R, IL13Rα2 (zetakine), Kappa, Leukemia, LewisY, Mesothelin, MUC1, NKG2D, NY-ESO-1, PSMA, ROR-1, TRAIL-receptor1, or VEGFR2.

[0208] In embodiments, the MUC1 is a tumor-exclusive epitope of a human MUC1, and the first CAR and the second CAR or the TCR are expressed as separate polypeptides. In embodiments, the MUC1 is a tumor form of human MUC1 (tMUC1).

[0209] In embodiments, the first CAR includes a co-stimulatory domain without a signaling domain, such as the CD3 zeta domain, and the MUC1 CAR (second CAR) comprises the MUC1 binding domain, a transmembrane domain, a co-stimulatory, and a CD3 zeta domain.

[0210] As used herein, the term “MUC1” refers to a molecule defined as follows. MUC1 is one of the epithelial mucin family of molecules. MUC1 is a transmembrane mucin glycoprotein that is normally expressed in all glandular epithelial cells of the major organs. In normal cells, MUC1 is only expressed on the apical surface and is heavily glycosylated with its core proteins sequestered by the carbohydrates. As cells transform into a malignant phenotype, expression of MUC1 increases several folds, and the expression is no longer restricted to the apical surface, but it is found all around the cell surface and in the cytoplasm. In addition, the glycosylation of tumor-associated MUC1 is aberrant, with greater exposure of the peptide core than is found on MUC1 expressed in normal tissues. Little is known regarding the specifics of the aberrant glycosylation.

[0211] MUC1 is widely expressed on a large number of epithelial cancers and is aberrantly glycosylated making it structurally and antigenically distinct from that expressed by non-malignant cells (see, e.g., Barratt-Boyes, 1996; Price et al., 1998; Peterson et al., 1991). The dominant form of MUC1 is a high molecular weight molecule comprising a large highly immunogenic extracellular mucin-like domain with a large number of twenty amino acid tandem repeats, a transmembrane region, and a cytoplasmic tail (Quin et al., 2000; McGucken et al., 1995; Dong et al., 1997).

[0212] In most epithelial adenocarcinomas including breast and pancreas, MUC1 is overexpressed and aberrantly glycosylated. Adenocarcinoma of the breast and pancreas not only overexpress MUC1 but also shed MUC1 into the circulation. High MUC1 serum levels are associated with progressive disease. MUC1 has been exploited as a prospective biomarker because of the complex and heterogeneous nature of the epitopes expressed within the antigen. MUC1 synthesized by cancerous tissues (e.g., tumor-associated MUC1) usually displays an aberrant oligosaccharide profile, which gives rise to the expression of neomarkers such as sialyl-Lea (assayed in the CA19-9 test), sialyl-Lex, and sialyl-Tn (TAG-72), as well as the cryptic epitopes such as Tn.

[0213] Several antibodies are being developed against MUC1 for therapeutic use. Pemtumomab (also known as HMFG1) is in Phase III clinical trials as a carrier to deliver the radioisotope Yttrium-90 into tumors in ovarian cancer (reviewed in Scott et al., 2012). CA15-3 (also the HMFG1 antibody), CA27-29, and CA19-9 are all antibodies to MUC1 that are used to assess levels of circulating MUC1 in patients with cancer. However, these antibodies have shown limited utility as therapeutic agents or as biomarkers because they cannot distinguish effectively between MUC1 expressed in normal versus transformed tumor epithelia. In other words, none of these antibodies appear to be targeted to a tumor-specific MUC1 epitope.

[0214] A new antibody that is highly specific for a tumor-specific form of MUC1 (tMUC) is designated TAB-004 and is described in U.S. Pat. No. 8,518,405 (see also Curry et al., 2013). While Pemtumomab (HMFG1) was developed using human milk fat globules as the antigen (Parham et al., 1988), TAB-004 was developed using tumors expressing an altered form of MUC1 (Tinder et al., 2008). TAB-004 recognizes the altered glycosylated epitope within the MUC1 tandem repeat sequence. This area is accessible for antigenic detection in tMUC but is blocked from antigenic detection in normal MUC1 by large branches of glycosylation (Gendler, 2001; Mukherjee et al., 2003b; Hollingsworth & Swanson, 2004; Kufe, 2009). Importantly, TAB-004 is different from the epitopes recognized by other MUC1 antibody and has unique complementary determinant regions (CDRs) of the heavy and light chains. The antibody binds the target antigen with a high binding affinity at 3 ng/ml (20 pM) and does not bind unrelated antigens (Curry et al., 2013). Thus, TAB-004 distinguishes between normal and tumor form of MUC1 while HMFG1 (Pemtumomab) does not (see U.S. Pat. No. 8,518,405).

[0215] In embodiments, the WBC is a granulocyte, monocyte, and/or lymphocyte. In embodiments, the WBC is a B cell.

[0216] In embodiments, the first CAR comprises the first antigen binding domain, a transmembrane domain, a co-stimulatory domain, and a CD3 zeta domain and/or the second CAR comprises the second antigen binding domain, a transmembrane domain, a co-stimulatory domain, and a CD3 zeta domain.

[0217] In embodiments, the antigen binding domain is a Fab or a scFv. In embodiments, the first CAR comprises the amino acid sequence of one of SEQ ID NO: 5, 6, and 53-58; and the second CAR comprises the amino acid sequence of one of SEQ ID NOs: 5-17, 29, 33, 37, 71, and 72, or the amino acid sequence encoded by the polynucleotide of one of SEQ ID NOs: 41, 45, 63, 67, and 68. In embodiments, a polynucleotide encoding the first CAR comprises the polynucleotide of SEQ ID NO: 59 or 60, and a polynucleotide encoding the second CAR comprises the polynucleotide of SEQ ID NO: 61. In embodiments, the isolated nucleic acid comprises one of the polynucleotides of SEQ ID NO: 62-69. In embodiments, the first CAR and the second CAR are expressed as separate polypeptides.

[0218] In embodiments, the first antigen binding domain is on a CAR, and the second antigen binding domain is on a T Cell Receptor (TCR). In embodiments, the TCR is a modified TCR. In embodiments, the TCR is derived from spontaneously occurring tumor-specific T cells in patients. In embodiments, the TCR binds a tumor antigen. In embodiments, the tumor antigen comprises CEA, gp100, MART-1, p53, MAGE-A3, or NY-ESO-1.

[0219] In embodiments, a T cell clone that expresses a TCR with a high affinity for the target antigen may be isolated. Tumor-infiltrating lymphocytes (TILs) or PBMCs can be cultured in the presence of antigen-presenting cells (APCs) pulsed with a peptide representing an epitope known to elicit a dominant T cell response when presented in the context of a defined HLA allele. High-affinity clones may be then selected on the basis of MHC-peptide tetramer staining and/or the ability to recognize and lyse target cells pulsed with low titrated concentrations of cognate peptide antigen. After the clone has been selected, the TCRα and TCRβ chains or TCRγ and TCRδ chains are identified and isolated by molecular cloning. For example, for TCRα and TCRβ chains, the TCRα and TCRβ gene sequences are then used to generate an expression construct that ideally promotes stable, high-level expression of both TCR chains in human T cells. The transduction vehicle, for example, a gammaretrovirus or lentivirus, can then be generated and tested for functionality (antigen specificity and functional avidity) and used to produce a clinical lot of the vector. An aliquot of the final product can then be used to transduce the target T cell population (generally purified from patient PBMCs), which is expanded before infusion into the patient.

[0220] Various methods may be implemented to obtain genes encoding tumor-reactive TCR. More information is provided in Kershaw et al., Clin Transl Immunology. 2014 May; 3(5): e16. In embodiments, specific TCR can be derived from spontaneously occurring tumor-specific T cells in patients. Antigens included in this category include the melanocyte differentiation antigens MART-1 and gp100, as well as the MAGE antigens and NY-ESO-1, with expression in a broader range of cancers. TCRs specific for viral-associated malignancies can also be isolated, as long as viral proteins are expressed by transformed cells. Malignancies in this category include liver and cervical cancer, associated with hepatitis and papilloma viruses, and Epstein-Barr virus-associated malignancies. In embodiments, target antigens of the TCR may include CEA (e.g., for colorectal cancer), gp100, MART-1, p53 (e.g., for Melanoma), MAGE-A3 (e.g., Melanoma, esophageal and synovial sarcoma), NY-ESO-1 (e.g., for Melanoma and sarcoma as well as Multiple myelomas).

[0221] In embodiments, preparation and transfusion of tumor infiltrating lymphocytes (TIL) may be implemented by the following. For example, tumor tissue from surgical or biopsy specimens, can be obtained under aseptic conditions and transported to the cell culture chamber in ice box. Necrotic tissue and adipose tissue can be removed. The tumor tissue may be cut into small pieces of about 1-3 cubic millimeter. Collagenase, hyaluronidase, and DNA enzyme can be added, and digested overnight at 4° C. Filtering with 0.2 um filter, cells can be separated and collected by lymphocyte separation fluid, 1500 rpm for 5 min. Expanding the cells with a culture medium comprising PHA, 2-mercaptoethanol, and CD3 monoclonal antibody, a small dose of IL-2 (10-20 IU/ml) can be added to induce activation and proliferation. According to the growth situation, the cell density can be carefully detected and maintained within the range of 0.5-2×10⁶/ml under the condition of 37° C. and 5% CO2 for 7-14 days. TIL positive cells have the ability to kill homologous cancer cell may be screened out by co-culture. The positive cells can be amplified in a serum-free medium containing a high dose of IL2 (5000-6000 IU/ml) until greater than 1×10¹¹ TILs can be obtained. To administer TILs, they may be first collected in saline solution using continuous-flow centrifugation and then filtered through a platelet-administration set into a volume of 200-300 mL containing 5% albumin and 450 000 IU of IL-2. The TILs may be infused into patients through a central venous catheter over a period of 30-60 minutes. In embodiments, TILs may be infused in two to four separate bags; the infusions may be separated by several hours.

[0222] In embodiments, a binding domain of the first CAR binds CD19, and a binding domain of the second CAR binds tumor-associated MUC1. In embodiments, the binding domain of the second CAR comprises: (i) a heavy chain complementary determining region 1 comprising the amino acid sequence of SEQ ID: 76 or 85, a heavy chain complementary determining region 2 comprising the amino acid sequence of SEQ ID: 77 or 86, and a heavy chain complementary determining region 3 comprising the amino acid sequence of SEQ ID: 78 or 87; and (ii) a light chain complementary determining region 1 comprising the amino acid sequence of SEQ ID: 73 or 82, a light chain complementary determining region 2 comprising the amino acid sequence of TRP-ALA-SER (WAS) or SEQ ID: 83, and a light chain complementary determining region 3 comprising the amino acid sequence of SEQ ID: 75 or 84.

[0223] In embodiments, the binding domain of the second CAR comprises: (i) a heavy chain complementary determining region 1 comprising the amino acid sequence of SEQ ID: 76, a heavy chain complementary determining region 2 comprising the amino acid sequence of SEQ ID: 77, and a heavy chain complementary determining region 3 comprising the amino acid sequence of SEQ ID: 78; and (ii) a light chain complementary determining region 1 comprising the amino acid sequence of SEQ ID: 73, a light chain complementary determining region 2 comprising the amino acid sequence of TRP-ALA-SER (WAS), and a light chain complementary determining region 3 comprising the amino acid sequence of SEQ ID: 75.

[0224] In embodiments, the binding domain of the second CAR comprises: (i) a heavy chain complementary determining region 1 comprising the amino acid sequence of SEQ ID: 85, a heavy chain complementary determining region 2 comprising the amino acid sequence of SEQ ID: 86, and a heavy chain complementary determining region 3 comprising the amino acid sequence of SEQ ID: 87; and (ii) a light chain complementary determining region 1 comprising the amino acid sequence of SEQ ID: 82, a light chain complementary determining region 2 comprising the amino acid sequence of SEQ ID: 83, and a light chain complementary determining region 3 comprising the amino acid sequence of SEQ ID: 84. In embodiments, the binding domain of the first CAR comprises the amino acid sequence of SEQ ID: 5 or 6. In embodiments, the binding domain of the second CAR comprises one of the amino acid sequences of SEQ ID: 70-72 and 79-81.

[0225] In embodiments, the first CAR comprises the first antigen binding domain, a transmembrane domain, a co-stimulatory domain, and a CD3 zeta domain and/or the second CAR comprises the second antigen binding domain, a transmembrane domain, a co-stimulatory domain, and a CD3 zeta domain.

[0226] In embodiments, the first CAR and the second CAR are expressed as separate polypeptides.

[0227] In embodiments, the cytoplasmic domain or the transmembrane domain of the second CAR is modified such that the second CAR is capable of activating the modified T cell via cells expressing CD19 without damaging the cells expressing CD19.

[0228] Embodiments described herein relate to a bispecific chimeric antigen receptor, comprising: a first antigen binding domain, a second antigen binding domain, a cytoplasmic domain, and transmembrane domain, wherein the first antigen binding domain recognizes a first antigen, and the second antigen binding domain recognizes a second antigen, the first antigen is different from the second antigen.

[0229] In embodiments, the first antigen and the second antigen do not express on the same cell. In embodiments, the first antigen is an antigen of a blood component, and the second antigen is an antigen of a solid tumor.

[0230] Blood cells refer to red blood cells (RBCs), white blood cells (WBCs), platelets, or other blood cells. For example, RBCs are blood cells of delivering oxygen (O₂) to the body tissues via the blood flow through the circulatory system. Platelets are cells that are involved in hemostasis, leading to the formation of blood clots. WBCs are cells of the immune system involved in defending the body against both infectious disease and foreign materials. There are a number of different types and sub-types of WBCs, and each has a different role to play. For example, granulocytes, monocytes, and lymphocytes are 3 major types of white blood cells. There are three different forms of granulocytes: Neutrophils, Eosinophils, Basophils.

[0231] A cell surface molecule of a WBC refers to a molecule expressed on the surface of the WBC. For example, the cell surface molecule of a lymphocyte may include CD19, CD22, CD20, BCMA, CD5, CD7, CD2, CD16, CD56, and CD30. The cell surface molecule of a B cell may include CD19, CD20, CD22, BCMA. The cell surface molecule of a monocyte may include CD14, CD68, CD11b, CD18, CD169, and CD1c. The cell surface molecule of granulocyte may include CD33, CD38, CD138, and CD13.

[0232] In embodiments, the first antigen is CD19, and the second antigen is a tumor-associated MUC1. In embodiments, the first antigen binding domain comprises one of the amino acid sequences of SEQ ID: 5 and 6. In embodiments, the second antigen binding domain comprises one of the amino acid sequence of SEQ ID: 70-72 and 79-81.

[0233] In embodiments, the present disclosure describes a method of enhancing T cell response in a subject or treating a tumor of the subject, the method comprising: administering an effective amount of modified T cell to the subject to provide a T cell response such that the CAR T cell is expanded in the blood of the subject via cells expressing CD19.

[0234] In embodiments, the tumor-associated MUC1 is expressed on tumor cells, but not on corresponding non-malignant cells. In embodiments, a scFv against the tumor-associated MUC1 directly interacts with an o-glycosylated GSTA motif (SEQ ID NO. 88).

[0235] Embodiments described herein relate to a cell comprising the bispecific CAR and to an isolated nucleic acid encoding the bispecific CAR.

[0236] In embodiments, the present disclosure describes a method of in vivo cell expansion. In embodiments, the method may include administering an effective amount of T cell comprising a CAR to the subject to provide a T cell response; and administering an effective amount of presenting cells (e.g., T cells) expressing a soluble agent that an extracellular domain of the CAR recognizes. In embodiments, the method may be implemented to enhance T cell response in a subject. The method may include administering an effective amount of T cell comprising a CAR to the subject to provide a T cell response and administering an effective amount of presenting cells expressing a soluble agent that an extracellular domain of the CAR recognizes to enhance the T cell response in the subject. In certain embodiments, the presenting cells are T cells, dendritic cells, and/or antigen-presenting cells. In certain embodiments, the enhancing T cell response in the subject may include selectively enhancing proliferation of T cell comprising the CAR. In embodiments, the method may be used to enhance the treatment of a condition on a subject using CAR T cells. The method may include administering a population of cells that express an agent or administering an agent that is formulated as a vaccine. In these instances, the CAR T cells include a nucleic acid that encodes a CAR, and an extracellular domain of the CAR recognizes the agent. In embodiments, the method may be implemented to enhance the proliferation of CAR T cells in a subject having a disease. The method may include preparing CAR T cells comprising a CAR; administering an effective amount of the CAR T cells to the subject; introducing, into cells, a nucleic acid encoding an agent that an extracellular domain of the CAR recognizes; and administering an effective amount of the cells (introduced with the nucleic acid encoding the agent) to the subject. In embodiments, the T cell expansion or increase in the number of T cells may be measured based on an increase in copy number of CAR molecules in genomic DNA of the T cells. In embodiments, the T cell expansion or increase in the number of T cells may be measured based on flow cytometry analysis on molecules expressed on the T cells.

[0237] Embodiments described herein relate to an isolated T cell comprising a first CAR, and a second CAR, wherein an antigen binding domain of the first CAR binds an antigen such as CD19, CD33, CD14, and BCMA, and an antigen binding domain of the second CAR binds a tumor-associated MUC. In embodiments, the tumor-associated MUC is MUC1 or MUC2. Embodiments described herein relate to a composition comprising a population of the isolated T cells and to a method of enhancing T cell response in a subject or treating a tumor of the subject, the method comprising: administering an effective amount of the isolated T cell.

[0238] In embodiments, the first CAR comprises the amino acid sequence of SEQ ID NO: 207, and the second CAR comprises the amino acid sequence of SEQ ID: 202. In embodiments, the first CAR comprises the amino acid sequence of SEQ ID NO: 203, 207, 216, or 219, and the second CAR comprises the amino acid sequence of SEQ ID: 202 or 205. In embodiments, the antigen binding domain of the second CAR comprises the amino acid sequence of SEQ ID NO: 70. In embodiments, the antigen binding domain of the second CAR comprises the amino acid sequence of SEQ ID NO: 5 or 6. In embodiments, the isolated T cell comprises a polynucleotide of SEQ ID NO: 201, 204, 206, 208, 215, 217, 218, or 220. In embodiments, each of the first CAR and the second CAR comprises an antigen binding domain, a transmembrane domain, and a cytoplasmic domain.

[0239] In embodiments, the cytoplasmic domain comprises a co-stimulatory domain and a CD3 zeta domain.

[0240] In embodiments, the isolated T cell comprises a dominant negative variant of a receptor of programmed death 1 (PD-1), cytotoxic T lymphocyte antigen-4 (CTLA-4), B- and T-lymphocyte attenuator (BTLA), T cell immunoglobulin mucin-3 (TIM-3), lymphocyte-activation protein 3 (LAG-3), T cell immunoreceptor with Ig and ITIM domains (TIGIT), leukocyte-associated immunoglobulin-like receptor 1 (LAIRI), natural killer cell receptor 2B4 (2B4), or CD 160. In embodiments, the isolated T cell comprises a reduced amount of TCR, as compared to the corresponding wide-type T cell. Dominant negative mutations have an altered gene product that acts antagonistically to the wild-type allele. These mutations usually result in an altered molecular function (often inactive) and are characterized by a dominant or semi-dominant phenotype.

[0241] The present disclosure describes pharmaceutical compositions. The pharmaceutical compositions include one or more of the following: CAR molecules, TCR molecules, modified CAR T cells, modified cells comprising CAR or TCR, modified cells, nucleic acids, and vectors described herein. Pharmaceutical compositions are administered in a manner appropriate to the disease to be treated (or prevented). The quantity and frequency of administration will be determined by such factors as the condition of the patient, and the type and severity of the patient's disease, although appropriate dosages may be determined by clinical trials.

[0242] When “an immunologically effective amount”, “an anti-tumor effective amount”, “a tumor-inhibiting effective amount”, or “therapeutic amount” is indicated, the precise amount of the compositions of the present disclosure to be administered can be determined by a physician with consideration of individual differences in age, weight, tumor size, extent of infection or metastasis, and condition of the patient (subject). It can be stated that a pharmaceutical composition comprising the T cells described herein may be administered at a dosage of 10⁴ to 10⁹ cells/kg body weight, preferably 10⁵ to 10⁶ cells/kg body weight, including all integer values within those ranges. T cell compositions may also be administered multiple times at these dosages. The cells can be administered by using infusion techniques that are commonly known in immunotherapy (see, e.g., Rosenberg et al., New Eng. J. of Med. 319:1676, 1988). The optimal dosage and treatment regime for a particular patient can readily be determined by one skilled in the art of medicine by monitoring the patient for signs of disease and adjusting the treatment accordingly. In certain embodiments, it may be desired to administer activated T cells to a subject and then subsequently redraw the blood (or have apheresis performed), collect the activated and expanded T cells, and reinfuse the patient with these activated and expanded T cells. This process can be carried out multiple times every few weeks. In certain embodiments, T cells can be activated from blood draws from 10 cc to 400 cc. In certain embodiments, T cells are activated from blood draws of 20 cc, 30 cc, 40 cc, 50 cc, 60 cc, 70 cc, 80 cc, 90 cc, or 100 cc. Not to be bound by theory, using this multiple blood draw/multiple reinfusion protocols, may select out certain populations of T cells.

[0243] The administration of the pharmaceutical compositions described herein may be carried out in any convenient manner, including by aerosol inhalation, injection, ingestion, transfusion, implantation, or transplantation. The compositions described herein may be administered to a patient subcutaneously, intradermally, intratumorally, intranodally, intramedullary, intramuscularly, by intravenous (i. v.) injection, or intraperitoneally. In embodiments, the T cell compositions described herein are administered to subjects by intradermal or subcutaneous injection. In embodiments, the T cell compositions of the present disclosure are administered by i.v. injection. The compositions of T cells may be injected directly into a tumor, lymph node, or site of infection. In embodiments, cells activated and expanded using the methods described herein, or other methods known in the art where T cells are expanded to therapeutic levels, are administered to patients in conjunction with (e.g., before, simultaneously or following) any number of relevant treatment modalities, including but not limited to treatment with agents for antiviral therapy, cidofovir and interleukin-2, Cytarabine (also known as ARA-C); or natalizumab treatment for MS patients; or efalizumab treatment for psoriasis patients or other treatments for PML patients. In further embodiments, the T cells described herein can be used in combination with chemotherapy, radiation, immunosuppressive agents, such as cyclosporin, azathioprine, methotrexate, mycophenolate, and FK506, antibodies, or other immunoablative agents such as CAM PATH, anti-CD3 antibodies or other antibody therapies, cytoxin, fludaribine, cyclosporin, FK506, rapamycin, mycophenolic acid, steroids, FR901228, cytokines, and irradiation. These drugs inhibit either the calcium dependent phosphatase calcineurin (cyclosporine and FK506) or inhibit the p70S6 kinase that is important for growth factor induced signaling (rapamycin). (Liu et al., Cell 66:807-815, 1991; Henderson et al., Immun 73:316-321, 1991; Bierer et al., Curr. Opin. Immun 5:763-773, 1993; Isoniemi (supra)). In embodiments, the cell compositions described herein are administered to a subject in conjunction with (e.g., before, simultaneously or following) bone marrow transplantation, T cell ablative therapy using either chemotherapy agents such as fludarabine, external-beam radiation therapy (XRT), cyclophosphamide, or antibodies such as OKT3 or CAMPATH. In embodiments, the cell compositions described herein are administered following B-cell ablative therapy. For example, agents that react with CD20, e.g., Rituxan may be administered to patients. In embodiments, subjects may undergo standard treatment with high dose chemotherapy followed by peripheral blood stem cell transplantation. In certain embodiments, following the transplant, subjects receive an infusion of the expanded immune cells of the present disclosure. In embodiments, expanded cells are administered before or following surgery.

[0244] In embodiments, CpG oligonucleotides (e.g., Class B CpG oligonucleotides) can be systemically and repeatedly administered to a subject to enhance anti-tumor effect of the pharmaceuticals described herein (e.g., CAR T cells) by introducing macrophage activation. For example, administration of CAR T cells and CpG oligonucleotides can be combined to treat a subject having a solid tumor. Information on administration of CpG oligonucleotides may be found at Nat Immunol. 2019 March; 20(3): 265-275, which is incorporated by reference in its entirety.

[0245] The dosage of the above treatments to be administered to a subject in need thereof will vary with the precise nature of the condition being treated and the recipient of the treatment. The scaling of dosages for human administration can be performed according to art-accepted practices by a physician depending on various factors.

[0246] Additional information on the methods of cancer treatment using engineered or modified T cells is provided in U.S. Pat. No. 8,906,682, incorporated by reference in its entirety.

[0247] Embodiments described herein relate to an in vitro method for preparing modified cells. The method may include obtaining a sample of cells from a subject. For example, the sample may include T cells or T cell progenitors. The method may further include transfecting the sample of cells with a DNA encoding at least a CAR and culturing the population of CAR cells ex vivo in a medium that selectively enhances proliferation of CAR-expressing T cells.

[0248] In embodiments, the sample is a cryopreserved sample. In embodiments, the sample of cells is from umbilical cord blood or a peripheral blood sample from the subject. In embodiments, the sample of cells is obtained by apheresis or venipuncture. In embodiments, the sample of cells is a subpopulation of T cells.

[0249] Some embodiments relate to a polynucleotide encoding one or more therapeutic agents comprising at least two cytokines, a modified cell comprising a polynucleotide encoding one or more therapeutic agents (e.g., the modified cell in FIGS. 55 and 56), and/or a method for enhancing T cell response (e.g., expansion and/or activation) in vitro and/or in vivo, the method comprising: introducing a polynucleotide encoding one or more therapeutic agents to obtain a modified cell; culturing the modified cell to obtain a population of modified cells; and contacting the population of modified cells with cells including an antigen, wherein the modified cells enhance the T cell response as compared to the corresponding wild-type cell or a modified cell not comprising the polynucleotide. Some embodiments relate to a population of the modified cells.

[0250] In embodiments, the one or more therapeutic agents comprise at least two of IL6, IL12, or IFNγ. In embodiments, the one or more therapeutic agents comprise at least IL12 and IFNγ. In embodiments, the one or more therapeutic agents comprise at least two of IL12, IL6, IFNγ, IFNβ, TNFα, or Neo-2/15. In embodiments, the modified cell comprises a polynucleotide encoding IL12 and IFNγ. In embodiments, the modified cell comprises a polynucleotide encoding TNFα. For example, the polynucleotide encoding TNFα is linked to a HIF VHL binding domain (i.e., VHL domain). For example, a VHL-interaction domain may be linked to a polynucleotide encoding TNF-α. Therefore, when the polynucleotide is introduced into the lymphocytes, TNF-α may be stably expressed in a hypoxic environment (e.g., tumor environments). Thereby, high concentrations of TNF-α in the peripheral blood of the patient in the clinical experiment are avoided. In embodiments, the lymphocytes may further conditionally express a CAR. For example, a VHL-interaction domain of Hif1a may be linked to a polynucleotide encoding a CAR such that the expression of the CAR can be induced by hypoxia.

[0251] In embodiments, the population of modified cells comprises two types of cells: function component cells and coupling component cells. The function component cells are capable of inhibiting tumor cells. In embodiments, the function components cells include a binding molecule binding a tumor antigen (e.g., a solid tumor antigen). For example, the binding molecule includes a CAR or a TCR binding solid tumor. In embodiments, the coupling component cells include a CAR targeting a white blood antigen. In embodiments, the coupling component cells include modified cells including a polynucleotide encoding IL-12 linked to a HIF VHL binding domain, and/or modified cells including a polynucleotide encoding IL-6 and IFNγ linked by 2A. An example of the population of modified cells is shown in FIG. 55 or 56.

[0252] In embodiments, the one or more therapeutic agents comprise at least one cytokine associated with an oxygen-sensitive polypeptide domain. In embodiments, the oxygen-sensitive polypeptide domain comprises a HIF VHL binding domain. In embodiments, the oxygen-sensitive polypeptide domain is or comprises SEQ ID NO: 457. In embodiments, the polynucleotide encodes a cytokine, an EA linker, and SEQ ID NO: 457. In embodiments, the polynucleotide encodes, or the modified cell comprises at least one of SEQ ID NO: 470-489 and 491-495.

[0253] In embodiments, the polynucleotide comprises a promoter comprising a binding site for a transcription modulator that modulates the expression and/or secretion of the therapeutic agent in the cell. In embodiments, the transcription modulator is or includes Hif1a, NFAT, FOXP3, and/or NFkB.

[0254] In embodiments, the polynucleotide encodes a binding molecule (e.g., CAR or TCR). In embodiments, the modified cell comprises a binding molecule (e.g., CAR or TCR).

[0255] In embodiments, the polynucleotide is present in the modified cell in a recombinant DNA construct, in an mRNA, or in a viral vector. In embodiments, the polynucleotide is an mRNA, which is not integrated into the genome of the modified cell.

[0256] In embodiments, the polynucleotide comprises a sequence encoding a cleavable peptide (e.g., 2A or IRES), which is disposed between at least two cytokines.

[0257] Some embodiments relate to a composition for treating a subject having cancer, the composition comprising a first population of cells and a second population of cells, wherein the first population of cells comprising a polynucleotide encoding a binding molecule binding a solid tumor antigen, a second population of cells comprising the polynucleotide described herein. In embodiments, the polynucleotide comprises a sequence encoding CAR binding CD19, a sequence encoding IL-6, and a sequence encoding IFNγ. In embodiments, the polynucleotide comprises a sequence encoding CAR binding CD19, a sequence encoding IL-12, and a sequence encoding IFNγ. In embodiments, the binding molecule is a CAR or a TCR. In embodiments, the first population of cells comprises a polynucleotide encoding TNFα that is linked to a HIF VHL binding domain.

[0258] Embodiments relate to a composition for treating a subject having cancer, the composition comprising a first population of cells and a second population of cells, wherein the first population of cells comprises a polynucleotide encoding a binding molecule binding a white blood antigen, a second population of cells comprising the polynucleotide described herein. In embodiments, the polynucleotide comprises a sequence encoding a binding molecule binding a solid tumor antigen, a sequence encoding IL-6, and a sequence encoding IFNγ. In embodiments, the polynucleotide comprises a sequence encoding a binding molecule binding a solid tumor antigen, a sequence encoding IL-12, and a sequence encoding IFNγ, wherein the binding molecule is a CAR or a TCR. In embodiments, the first population of cells comprises a polynucleotide encoding TNFα that is linked to a HIF VHL binding domain.

[0259] Some embodiments relate to a method of causing or inducing a T cell response, enhancing the T cell response, treating a subject having cancer, or enhancing the treatment, the method comprising: administering an effective amount of the composition described herein to a subject having cancer.

TABLE 2

| | SEQ | | SEQ | | SEQ |
|---|---|---|---|---|---|
| | ID | | ID | | ID |
| Name | NO: | Name | NO: | Name | No: |
| SP | 1 | UPK2 | 101 | Construct of MUC1- | 201 |
| | | | | 5E5-A-IRES-CD19-A | |
| Hinge & | 2 | ADAM12 | 102 | CAR 1 of MUC1-5E5- | 202 |
| transmembrane | | | | A-IRES-CD19-A | |
| domain | | | | | |
| Co-stimulatory | 3 | SLC45A3 | 103 | CAR 2 of MUC1-5E5- | 203 |
| domain | | | | A-IRES-CD19-A | |
| CD3-zeta | 4 | ACPP | 104 | Construct of MUC1- | 204 |
| | | | | 5E5-B-IRES-CD19-A | |
| scFV Humanized | 5 | MUC21 | 105 | CAR 1 of MUC1-5E5- | 205 |
| CD19 | | | | B-IRES-CD19-A | |
| scFV CD19 | 6 | MUC16 | 106 | CAR 2 of MUC1-5E5- | 203 |
| | | | | B-IRES-CD19-A | |
| scFv FZD10 | 7 | MS4A12 | 107 | Construct of MUC1- | 206 |
| | | | | 5E5-A-IRES-CD19-B | |
| scFv TSHR | 8 | ALPP | 108 | CAR 1 of MUC1-5E5- | 202 |
| | | | | A-IRES-CD19-B | |
| scFv PRLR | 9 | SLC2A14 | 109 | CAR 2 of MUC1-5E5- | 207 |
| | | | | A-IRES-CD19-B | |
| scFv Muc 17 | 10 | GS1-259H13.2 | 110 | Construct of MUC1- | 208 |
| | | | | 5E5-B-IRES-CD19-B | |
| scFv GUCY2C | 11 | ERVFRD-1 | 111 | CAR 1 of MUC1-5E5- | 205 |
| | | | | B-IRES-CD19-B | |
| scFv CD207 | 12 | ADGRG2 | 112 | CAR 2 of MUC1-5E5- | 207 |
| | | | | B-IRES-CD19-B | |
| Prolactin (ligand) | 13 | ECEL1 | 113 | Construct of MUC1-2- | 209 |
| | | | | A-IRES-CD19-A | |
| scFv CD3 | 14 | CHRNA2 | 114 | CAR 1 of MUC1-2-A- | 210 |
| | | | | IRES-CD19-A | |
| scFv CD4 | 15 | GP2 | 115 | CAR 2 of MUC1-2-A- | 203 |
| | | | | IRES-CD19-A | |
| scFv CD4-2 | 16 | PSG9 | 116 | Construct of MUC1-2- | 211 |
| | | | | B-IRES-CD19-A | |
| scFv CD5 | 17 | SIGLEC15 | 117 | CAR 1 of MUC1-2-B- | 212 |
| | | | | IRES-CD19-A | |
| CD19 antigen | 18 | SLC6A3 | 118 | CAR 2 of MUC1-2-B- | 203 |
| | | | | IRES-CD19-A | |
| FZD10 antigen | 19 | KISS1R | 119 | Construct of MUC1-2- | 213 |
| | | | | A-IRES-CD19-B | |
| TSHR antigen | 20 | QRFPR | 120 | CAR 1 of MUC1-2-A- | 210 |
| | | | | IRES-CD19-B | |
| PRLR antigen | 21 | GPR119 | 121 | CAR 2 of MUC1-2-A- | 207 |
| | | | | IRES-CD19-B | |
| Muc 17 antigen | 22 | CLDN6 | 122 | Construct of MUC1-2- | 214 |
| | | | | B-IRES-CD19-B | |
| GUCY2C antigen | 23 | SP-2 | 123 | CAR 1 of MUC1-2-B- | 212 |
| | | | | IRES-CD19-B | |
| CD207 antigen | 24 | Linker-2 | 124 | CAR 2 of MUC1-2-B- | 207 |
| | | | | IRES-CD19-B | |
| CD3 antigen | 25 | Hinge-2 | 125 | Construct of MUC1- | 215 |
| | | | | 5E5-A-IRES-hCD19-A | |
| CD4 antigen | 26 | TM-2 | 126 | CAR 1 of MUC1-5E5- | 202 |
| | | | | A-IRES-hCD19-A | |
| CD5 antigen | 27 | 4-1BB-2 | 127 | CAR 2 of MUC1-5E5- | 216 |
| | | | | A-IRES-hCD19-A | |
| CAR CD19 nucleic | 28 | CD3 zeta-2 | 128 | Construct of MUC1- | 217 |
| acid | | | | 5E5-B-IRES-hCD19-A | |
| Hinge & TM | 29 | CLDN6-CAR-1 | 129 | CAR 1 of MUC1-5E5- | 205 |
| domain B | | | | B-IRES-hCD19-A | |
| Hinge & TM | 30 | ScFv CLDN6-CAR-1 | 130 | CAR 2 of MUC1-5E5- | 216 |
| domain A | | | | B-IRES-hCD19-A | |
| Hinge & TM | 31 | ScFv VL CLDN6- | 131 | Construct of MUC1- | 218 |
| domain D | | CAR-1 | | 5E5-A-IRES-hCD19-B | |
| Hinge & TM | 32 | ScFv VH CLDN6- | 132 | CAR 1 of MUC1-5E5- | 202 |
| domain C | | CAR-1 | | A-IRES-hCD19-B | |
| Hinge domain D | 33 | CLDN6-CAR-2 | 133 | CAR 2 of MUC1-5E5- | 219 |
| | | | | A-IRES-hCD19-B | |
| Hinge domain C | 34 | ScFv CLDN6-CAR-2 | 134 | Construct of MUC1- | 220 |
| | | | | 5E5-B-IRES-hCD19-B | |
| Hinge domain B | 35 | ScFv VL CLDN6- | 135 | CAR 1 of MUC1-5E5- | 205 |
| | | CAR-2 | | B-IRES-hCD19-B | |
| Hinge domain A | 36 | ScFv VH CLDN6- | 136 | CAR 2 of MUC1-5E5- | 219 |
| | | CAR-2 | | B-IRES-hCD19-B | |
| TM domain D | 37 | CLDN6-CAR-3 | 137 | Construct of MUC1-2- | 221 |
| | | | | A-IRES-hCD19-A | |
| TM domain A | 38 | scFv CLDN6-CAR-3 | 138 | CAR 1 of MUC1-2-A- | 210 |
| | | | | IRES-hCD19-A | |
| CD19 extracellular | 39 | scFv VL CLDN6-CAR- | 139 | CAR 2 of MUC1-2-A- | 216 |
| domain | | 3 | | IRES-hCD19-A | |
| TM domain C or B | 40 | scFv VH CLDN6- | 140 | Construct of MUC1-2- | 222 |
| | | CAR-3 | | B-IRES-hCD19-A | |
| WTCD3zeta | 41 | CLDN6-CAR-4 | 141 | CAR 2CAR 1 of | 212 |
| | | | | MUC1-2-B-IRES- | |
| | | | | hCD19-A | |
| WTCD3zeta- | 42 | scFv CLDN6-CAR-4 | 142 | Construct of MUC1-2- | 216 |
| BCMACAR full | | | | B-IRES-hCD19-A | |
| length | | | | | |
| BCMA | 43 | scFv VL CLDN6-CAR- | 143 | Construct of MUC1-2- | 223 |
| | | 4 | | A-IRES-hCD19-B | |
| BCMA CAR vector | 44 | scFv VH CLDN6- | 144 | CAR 1 of MUC1-2-A- | 210 |
| | | CAR-4 | | IRES-hCD19-B | |
| BCMA CAR vector | 45 | SIGLEC-15-CAR-1 | 145 | CAR 2 of MUC1-2-A- | 219 |
| | | | | IRES-hCD19-B | |
| VL anti-CD5 | 46 | scFv SIGLEC-15- | 146 | Construct of MUC1-2- | 224 |
| | | CAR-1 | | B-IRES-hCD19-B | |
| VH anti-CD5 | 47 | scFv VL SIGLEC-15- | 147 | CAR 1 of MUC1-2-B- | 212 |
| | | CAR-1 | | IRES-hCD19-B | |
| VL anti-CD4 | 48 | scFv VH SIGLEC-15- | 148 | CAR 2 of MUC1-2-B- | 219 |
| | | CAR-1 | | IRES-hCD19-B | |
| VH anti-CD4 | 49 | VL1 VH1 SIGLEC-15- | 149 | Construct of MUC1- | 225 |
| | | CAR-2 | | 5E5-A-IRES-CD22-A | |
| VL anti-CD3 | 50 | VL1 VH2 SIGLEC-15- | 150 | CAR 1 of MUC1-5E5- | 202 |
| | | CAR-3 | | A-IRES-CD22-A | |
| VH anti-CD3 | 51 | VL1 VH3 SIGLEC-15- | 151 | CAR 2 of MUC1-5E5- | 226 |
| | | CAR-4 | | A-IRES-CD22-A | |
| TSHR extracellular | 52 | VL1 VH 4 SIGLEC-15- | 52 | Construct of MUC1- | 227 |
| domain | | CAR-5 | | 5E5-B-IRES-CD22-A | |
| VH region of | 53 | VL2 VH 1 SIGLEC-15- | 153 | CAR 1 of MUC1-5E5- | 205 |
| BCMA scFv | | CAR-6 | | A-IRES-CD22-A | |
| VL region of | 54 | VL2 VH2 SIGLEC-15- | 154 | CAR 2 of MUC1-5E5- | 226 |
| BCMA scFv | | CAR-7 | | A-IRES-CD22-A | |
| VH region of CD14 | 55 | VL2 VH3 SIGLEC-15- | 155 | Construct of MUC1- | 228 |
| scFv | | CAR-8 | | 5E5-A-IRES-CD22-B | |
| VL region of CD14 | 56 | VL2 VH4 SIGLEC-15- | 156 | MUC1-5E5-A-IRES- | 202 |
| scFv | | CAR-9 | | CD22-B CAR 1 | |
| VH region of CD33 | 57 | VL1 SIGLEC-15-CAR | 157 | MUC1-5E5-A-IRES- | 229 |
| scFv | | | | CD22-B CAR 2 | |
| VL region of CD33 | 58 | VL2 SIGLEC-15-CAR | 158 | MUC1-5E5-B-IRES- | 230 |
| scFv | | | | CD22-B | |
| CD22CAR | 59 | VH1 SIGLEC-15-CAR | 159 | CAR 1 of MUC1-5E5- | 205 |
| | | | | B-IRES-CD22-B | |
| BCMACAR | 60 | VH2 SIGLEC-15-CAR | 160 | CAR 2 of MUC1-5E5- | 229 |
| | | | | B-IRES-CD22-B | |
| MUC1CAR | 61 | VH3 SIGLEC-15-CAR | 161 | Construct of MUC1-2- | 231 |
| | | | | A-IRES-CD22-A | |
| m19CAR-IRES- | 62 | VH4 SIGLEC-15-CAR | 162 | CAR 1 of MUC1-2-A- | 210 |
| MUC1CAR | | | | IRES-CD22-A | |
| hCD19CAR-IRES- | 63 | MUC16-CAR-1 | 163 | CAR 2 of MUC1-2-A- | 226 |
| MUC1CAR | | | | IRES-CD22-A | |
| hCD22CAR-IRES- | 64 | scFv MUC16-CAR-1 | 164 | MUC1-2-B-IRES- | 232 |
| MUC1CAR | | | | CD22-A | |
| BCMACAR-IRES- | 65 | scFv VL MUC16- | 165 | MUC1-2-B-IRES- | 212 |
| MUC1CAR | | CAR-1 | | CD22-A CAR 1 | |
| mCD19CAR-2A- | 66 | scFv VH MUC16- | 166 | MUC1-2-B-IRES- | 226 |
| MUC1CAR | | CAR-1 | | CD22-A CAR 2 | |
| hCD19CAR-2A- | 67 | MUC16-CAR-2 | 167 | MUC1-2-A-IRES- | 233 |
| MUC1CAR | | | | CD22-B | |
| hCD22CAR-2A- | 68 | scFv MUC16-CAR-2 | 168 | MUC1-2-A-IRES- | 210 |
| MUC1CAR | | | | CD22-B CAR 1 | |
| BCMA-2A- | 69 | scFv VL MUC16- | 169 | MUC1-2-A-IRES- | 229 |
| MUC1CAR | | CAR-2 | | CD22-B CAR 2 | |
| Tumor associated | 70 | scFv VH MUC16- | 170 | Construct of MUC1-2- | 234 |
| MUC1 scFv 1 | | CAR-2 | | B-IRES-CD22-B | |
| Tumor associated | 71 | KISS1R-CAR | 171 | CAR 1 of MUC1-2-B- | 212 |
| MUC1 scFv-1 VH | | | | IRES-CD22-B | |
| Tumor associated | 72 | Ligent peptide | 172 | CAR 2 of MUC1-2-B- | 229 |
| MUC1 scFv-1 VL | | KISS1R-CAR | | IRES-CD22-B | |
| Tumor-associated | 73 | ZFLm1 (left) RS aa | 173 | Construct of MUC1- | 235 |
| MUC1 scFv-1 VL | | | | 5E5-A-IRES-CD14-A | |
| CDR 1 | | | | | |
| L2D8-2 (hCAR VL) | 74 | ZFLm1 (left) F1 | 174 | CAR 1 of MUC1-5E5- | 202 |
| | | | | A-IRES-CD14-A | |
| Tumor-associated | 75 | ZFLm1 (left) F2 | 174 | CAR 2 of MUC1-5E5- | 236 |
| MUC1 scFv-1 VL | | | | A-IRES-CD14-A | |
| CDR 3 | | | | | |
| Tumor-associated | 76 | ZFLm1 (left) F3 | 176 | Construct of MUC1- | 237 |
| MUC1 scFv-1 VH | | | | 5E5-B-IRES-CD14-A | |
| CDR 1 | | | | | |
| Tumor associated | 77 | ZFLm1 (left) F4 | 177 | CAR 1 of MUC1-5E5- | 205 |
| MUC1 scFv-1 VH | | | | B-IRES-CD14-A | |
| CDR 2 | | | | | |
| Tumor-associated | 78 | ZFLm1 (left) F5 | 178 | CAR 2 of MUC1-5E5- | 236 |
| MUC1 scFv-1 VH | | | | B-IRES-CD14-A | |
| CDR 3 | | | | | |
| Tumor-associated | 79 | ZFLm1 (left) F6 | 179 | Construct of MUC1- | 238 |
| MUC1 scFv 2 | | | | 5E5-A-IRES-CD14-B | |
| Tumor-associated | 80 | ZFRm1-4 (right) RS | 180 | CAR 1 of MUC1-5E5- | 202 |
| MUC1 scFv2 VH | | aa | | A-IRES-CD14-B | |
| Tumor-associated | 81 | ZFRm1-4 (right) F1 | 181 | CAR 2 of MUC1-5E5- | 239 |
| MUC1 scFv2 VL | | | | A-IRES-CD14-B | |
| Tumor-associated | 82 | ZFRm1-4 (right) F2 | 182 | Construct of MUC1-2- | 240 |
| MUC1 scFv-2 VL | | | | A-IRES-CD14-A | |
| CDR 1 | | | | | |
| Tumor-associated | 83 | ZFRm1-4 (right) F3 | 184 | CAR 1 of MUC1-2-A- | 210 |
| MUC1 scFv-2 VL | | | | IRES-CD14-A | |
| CDR 2 | | | | | |
| Tumor-associated | 84 | ZFRm1-4 (right) F4 | 184 | CAR 2 of MUC1-2-A- | 236 |
| MUC1 scFv-2 VL | | | | IRES-CD14-A | |
| CDR 3 | | | | | |
| ′Tumor-associated | 85 | δ chain-1 of | 185 | Construct of MUC1-2- | 241 |
| MUC1 scFv-2VH | | Vγ9Vδ2 | | B-IRES-CD14-A | |
| CDR 1 | | | | | |
| Tumor-associated | 86 | γ chain-2 of Vγ9Vδ2 | 186 | CAR 1 of MUC1-2-B- | 212 |
| MUC1 scFv-2 VH | | | | IRES-CD14-A | |
| CDR 2 | | | | | |
| Tumor-associated | 87 | δ chain-2 of Vγ9Vδ2 | 187 | CAR 2 of MUC1-2-B- | 236 |
| MUC1 scFv-2 VH | | | | IRES-CD14-A | |
| CDR 3 | | | | | |
| GSTA motif | 88 | Vγ9Vδ2 TCR-1: | 188 | Construct of MUC1-2- | 242 |
| | | DG.SF13 | | A-IRES-CD14-B | |
| | | γ chain | | | |
| Modified PD-1 | 89 | Vγ9Vδ2 TCR-1: | 189 | CAR 1 of MUC1-2-A- | 210 |
| intracellular | | DG.SF13 | | IRES-CD14-B | |
| domain -1 | | δ chain | | | |
| Modified PD-1 | 90 | Vγ9Vδ2 TCR-2: | 190 | CAR 2 of MUC1-2-A- | 239 |
| intracellular | | DG.SF68: | | IRES-CD14-B | |
| domain -2 | | γ chain | | | |
| Modified PD-1 | 91 | Vγ9Vδ2 TCR-2: | 191 | Construct of MUC1-2- | 243 |
| intracellular | | DG.SF68: | | B-IRES-CD14-B | |
| domain -3 | | δ chain | | | |
| Modified PD-1 | 92 | Vγ9Vδ2 TCR-3: | 192 | CAR 1 of MUC1-2-B- | 212 |
| intracellular | | 12G12: | | IRES-CD14-B | |
| domain -4 | | γ chain | | | |
| Modified PD-1 | 93 | Vγ9Vδ2 TCR-3: | 193 | CAR 2 of MUC1-2-B- | 239 |
| intracellular | | 12G12: | | IRES-CD14-B | |
| domain -5 | | δ chain | | | |
| Removed PD-1 | 94 | Vγ9Vδ2 TCR-4: | 194 | Construct of MUC1- | 244 |
| intracellular | | CP.1.15 | | 5E5-A-IRES-BCMA-A | |
| domain -1 | | γ chain | | | |
| Removed PD-1 | 95 | TCR-4: CP.1.15δ | 195 | CAR 1 of MUC1-5E5- | 202 |
| intracellular | | chain | | A-IRES-BCMA-A | |
| domain -2 | | | | | |
| Fokl WC | 96 | WT CD3-zeta | 196 | CAR 2 of MUC1-5E5- | 245 |
| | | | | A-IRES-BCMA-A | |
| M Fokl | 97 | Invariant sequence for | 197 | Construct of MUC1- | 246 |
| | | iNKTα chain (hVα24- | | 5E5-B-IRES-BCMA-A | |
| | | JαQ-TRAC) | | | |
| M Fokl | 98 | An example of iNKT β | 198 | CAR 1 of MUC1-5E5- | 205 |
| | | chain sequence | | B-IRES-BCMA-A | |
| | | (containing Vβ11): | | | |
| γ chain-1 of | 99 | Invariant sequence for | 199 | CAR 2 of MUC1-5E5- | 245 |
| Vγ9Vδ2 | | MAIT α chain | | B-IRES-BCMA-A | |
| | | (hAV7S2-AJ33 α | | | |
| | | chain) (version1) | | | |
| VL anti-CD4-2 | 100 | VH anti- CD4-2 | 200 | Construct of MUC1- | 247 |
| | | | | 5E5-A-IRES-BCMA-B | |
| CAR 1 of MUC1-2- | 210 | CAR 1 of MUC1-5E5- | 205 | CAR 1 of MUC1-5E5- | 202 |
| A-IRES-CD33-A | | B-IRES-CD33-A | | A-IRES-BCMA-B | |
| CAR 2 of MUC1-2- | 255 | CAR 2 of MUC1-5E5- | 255 | CAR 2 of MUC1-5E5- | 248 |
| A-IRES-CD33-A | | B-IRES-CD33-A | | A-IRES-BCMA-B | |
| Construct | 261 | Construct ofMUC1- | 257 | Construct of MUC1- | 249 |
| ofMUC1-2-B- | | 5E5-A-IRES-CD33-B | | 5E5-B-IRES-BCMA-B | |
| IRES-CD33-A | | | | | |
| CAR 1 of MUC1-2- | 212 | CAR 1 of MUC1-5E5- | 202 | CAR 1 of MUC1-5E5- | |
| B-IRES-CD33-A | | A-IRES-CD33-B | | B-IRES-BCMA-B | |
| CAR 2 of MUC1-2- | 255 | CAR 2 of MUC1-5E5- | 258 | CAR 2 of MUC1-5E5- | |
| B-IRES-CD33-A | | A-IRES-CD33-B | | B-IRES-BCMA-B | |
| Construct | 262 | Construct ofMUC1- | 259 | Construct of MUC1-2- | 250 |
| ofMUC1-2-A- | | 5E5-B-IRES-CD33-B | | A-IRES-BCMA-A | |
| IRES-CD33-B | | | | | |
| CAR 1 of MUC1-2- | 210 | CAR 1 of MUC1-5E5- | 205 | CAR 1 of MUC1-2-A- | 210 |
| A-IRES-CD33-B | | B-IRES-CD33-B | | IRES-BCMA-A | |
| CAR 2 of MUC1-2- | 258 | CAR 2 of MUC1-5E5- | 258 | CAR 2 of MUC1-2-A- | 245 |
| A-IRES-CD33-B | | B-IRES-CD33-B | | IRES-BCMA-A | |
| Construct | 263 | Construct ofMUC1-2- | 260 | Construct of MUC1-2- | 251 |
| ofMUC1-2-B- | | A-IRES-CD33-A | | B-IRES-BCMA-A | |
| IRES-CD33-B | | | | | |
| CAR 1 of MUC1-2- | 212 | Construct ofMUC1-2- | 253 | CAR 1 of MUC1-2-B- | 212 |
| B-IRES-CD33-B | | B-IRES-BCMA-B | | IRES-BCMA-A | |
| CAR 2 of MUC1-2- | 258 | CAR 1 of MUC1-2-B- | 212 | CAR 2 of MUC1-2-B- | 245 |
| B-IRES-CD33-B | | IRES-BCMA-B | | IRES-BCMA-A | |
| Construct | 254 | MUC1-2-B-IRES- | 248 | Construct of MUC1-2- | 252 |
| ofMUC1-5E5-A- | | BCMA-B CAR 2 | | A-IRES-BCMA-B | |
| IRES-CD33-A | | | | | |
| CAR 1 of MUC1- | 202 | MUC1-5E5-B-IRES- | 256 | CAR 1 of MUC1-2-A- | 210 |
| 5E5-A-IRES- | | CD33-A | | IRES-BCMA-B | |
| CD33-A | | | | | |
| CAR 2 of MUC1- | 255 | CAR 2 of MUC1-2-A- | 248 | MUC1-5e5Panko- | 264 |
| 5E5-A-IRES- | | IRES-BCMA-B | | enhanced scFc | |
| CD33-A | | | | | |
| MUC1-Panko5e5 - | 265 | hinge and/or | 266 | hinge and/or | 267 |
| enhanced scFc | | transmembrane | | transmembrane | |
| | | domain A | | domain B | |
| hinge and/or | 268 | hinge and/or | 269 | MUC1-5e5Panko- | 270 |
| transmembrane | | transmembrane | | enhanced scFc | |
| domain C | | domain D | | A 41BB CD2 zeta | |
| MUC1-5e5Panko- | 271 | MUC1-5e5Panko- | 272 | MUC1-5e5Panko- | 273 |
| enhanced | | enhanced scFc | | enhanced scFc | |
| scFc B 41BB CD2 | | C 41BB CD2 zeta | | D 41BB CD2 zeta | |
| zeta | | | | | |
| MUC1-Panko5e5- | 274 | MUC1-Panko5e5- | 275 | MUC1-Panko5e5- | 276 |
| enhanced | | enhanced scFc | | enhanced scFc C | |
| scFc A 41BB CD2 | | B 41BB CD2 zeta | | 41BB CD2 zeta | |
| zeta | | | | | |
| MUC1-Panko5e5- | 277 | GS linker | 278 | Construct of TSHR | 279 |
| enhanced | | | | CAR | |
| scFc D 41BB CD2 | | | | | |
| zeta | | | | | |
| CD8a Hinge & | 280 | IL-17C | 296 | IL12- IgG4 Hinge | 313 |
| transmembrane | | Nucleic acid | | &CD8a | |
| | | Sequence | | transmembrane | |
| CD8a | 281 | IL-17C | 297 | IL12Rβ2 cytoplasmic | 314 |
| transmembrane | | aa Sequence | | | |
| IgG4 Hinge&CD8a | 282 | IL-17D | 298 | IL18R1 cytoplasmic | 315 |
| transmembrane | | Nucleic acid | | | |
| | | Sequence | | | |
| IL-2 | 283 | IL-17D | 299 | IL23R cytoplasmic | 316 |
| Nucleic acid | | aa Sequence | | | |
| Sequence | | | | | |
| IL-2 | 285 | IL-17F | 300 | Gp130 (IL6ST) | 317 |
| aa Sequence | | Nucleic acid | | cytoplasmic | |
| | | Sequence | | | |
| IL-6 | 286 | IL-17F | 301 | IL15Ra, cytoplasmic | 318 |
| Nucleic acid | | aa Sequence | | | |
| Sequence | | | | | |
| IL-6 | 287 | IL-23A | 302 | IL12Rβ1 | 319 |
| aa Sequence | | Nucleic acid | | cytoplasmic | |
| | | Sequence | | | |
| IL-7 | 288 | IL-23A | 303 | 41BB + cd3zeta + IL | 320 |
| Nucleic acid | | aa Sequence | | receptor cytoplasmic | |
| Sequence | | | | region | |
| IL-7 | 289 | IL-18 | 304 | scFv + hinge + | 321 |
| aa Sequence | | Nucleic acid | | transmembrane + | |
| | | Sequence | | 41BB + IL | |
| | | | | receptor cytoplasmic | |
| | | | | region + cd3zeta | |
| IL-15 | 290 | IL-18 | 305 | scFv + hinge + | 322 |
| Nucleic acid | | aa Sequence | | transmembrane + | |
| Sequence | | | | IL receptor cytoplasmic | |
| | | | | region + 41BB + | |
| | | | | cd3zeta | |
| IL-15 | 291 | IL-12 αp35 | 306 | 41BB promoter | 323 |
| aa Sequence | | Nucleic acid | | | |
| | | Sequence | | | |
| IL-17A | 292 | IL-12αp35 | 307 | CD25 enhancer + | 324 |
| Nucleic acid | | aa Sequence | | minimal TK promoter | |
| Sequence | | | | | |
| IL-17A | 293 | IL-12βp40 | 308 | CD69 enhancer + | 325 |
| aa Sequence | | Nucleic acid | | minimal TK promoter | |
| | | Sequence | | | |
| IL-17B | 294 | IL-12 βp40 | 309 | IFN-gamma promoter | 326 |
| Nucleic acid | | aa Sequence | | | |
| Sequence | | | | | |
| IL-17B | 295 | Fusion IL-12 | 310 | 2A | 327 |
| aa Sequence | | | | | |
| Hypoxia promoter | 330 | Fusion IL-23 | 311 | IFN-γ | 328 |
| (example 2) | | | | | |
| Transcription | | | | | |
| factor binding | | | | | |
| sites. | | | | | |
| Hypoxia promoter | 331 | IL-12- CD8a Hinge & | 312 | hPDE5 | 329 |
| (example 3) | | transmembrane | | | |
| Transcription | | | | | |
| factor binding | | | | | |
| sites. | | | | | |
| NFAT promoter | 332 | Hypoxia promoter | 338 | TNF-alpha | 347 |
| (example 1) | | (example 1) the | | | |
| Transcription | | minimal promoter | | | |
| factor binding | | | | | |
| sites. | | | | | |
| NFAT promoter | 333 | Hypoxia promoter | 339 | Lymphotoxin | 348 |
| (example 2) | | (example 2) the | | beta (TNF-C) | |
| Transcription | | minimal promoter | | | |
| factor binding | | | | | |
| sites. | | | | | |
| FOXP3 promoter | 334 | Hypoxia promoter | 340 | OX40L | 349 |
| (example 1) | | (example 3) the | | | |
| Transcription | | minimal promoter | | | |
| factor binding | | | | | |
| sites. | | | | | |
| Hypoxia promoter | 335 | NFAT promoter | 341 | CD154 | 350 |
| (example 1) | | (example 1) the | | | |
| Transcription | | minimal promoter | | | |
| factor binding | | | | | |
| sites. | | | | | |
| NFkB promoter | 336 | NFAT promoter | 342 | FasL | 351 |
| (example 1) | | (example 2) the | | | |
| Transcription | | minimal promoter | | | |
| factor binding | | | | | |
| sites. | | | | | |
| NFkB promoter | 337 | FOXP3 promoter | 343 | CD70 | 352 |
| (example2) | | (example1) the | | | |
| Transcription | | minimal promoter | | | |
| factor binding | | | | | |
| sites. | | | | | |
| CXCl1 | 364 | FOXP3 promoter | 344 | CD153 | 353 |
| | | (example2) the | | | |
| | | minimal promoter | | | |
| CXCL2 | 365 | NFkB promoter | 345 | 4-1BB ligand | 354 |
| | | (example1) the | | | |
| | | minimal promoter | | | |
| CXCL3 | 366 | NFkB promoter | 346 | TRAIL | 355 |
| | | (example2) the | | | |
| | | minimal promoter | | | |
| CXCL4 | 367 | CXCL11 | 374 | RANKL | 356 |
| CXCL5 | 368 | CXCL12 | 375 | TWEAK | 357 |
| CXCL6 | 369 | CXCL13 | 376 | APRIL | 358 |
| CXCL7 | 370 | CXCL14 | 377 | LIGHT | 359 |
| CXCL8 | 371 | CCL1 | 378 | NGF, | 360 |
| CXCL9 | 372 | CCL2 | 379 | TNFSF18 | 361 |
| CXCL10 | 373 | CCL3 | 380 | TNFSF15 | 362 |
| ICOS ligand | 405 | CCl3L1 | 381 | Ectodysplasin-A | 363 |
| CD80 | 406 | CCl4 | 382 | IL2 receptor CD | 415 |
| CD86 | 407 | CCl5 | 383 | IL6 receptor CD | 418 |
| scFv against PD1 | 408 | CCl7 | 384 | IL7 receptor CD | 421 |
| scFv against PDL1 | 409 | CCl8 | 385 | IL12 receptor CD | 424 |
| B7-H3 scFv 1 | 410 | CCl11 | 386 | IL15 receptor CD | 427 |
| B7-H3 scFv2 | 411 | CCL13 | 387 | IL21 receptor CD | 430 |
| B7-H3 scFv3 | 412 | CCl14 | 388 | IL23 receptor CD | 433 |
| IL2 receptor ED | 413 | CCL15 | 389 | CD4 TM | 434 |
| IL6 receptor ED | 416 | CCl16 | 390 | CD8 TM | 436 |
| IL7 receptor ED | 419 | CCL17 | 391 | CD27 TM | 438 |
| IL12 receptor ED | 422 | CCl18 | 392 | CD28 TM | 440 |
| IL15 receptor ED | 425 | CCL19 | 393 | CD137 TM | 442 |
| IL21 receptor ED | 428 | CCL20 | 394 | PD1 TM | 444 |
| IL23 receptor ED | 431 | CCL21 | 395 | PDL1 TM | 446 |
| IL2 receptor TM | 414 | CCL22 | 396 | CD4 CD | 435 |
| IL6 receptor TM | 417 | CCL23 | 397 | CD8 CD | 437 |
| IL7 receptor TM | 420 | CCL24 | 398 | CD27 CD | 439 |
| IL12 receptor TM | 423 | CCL25 | 399 | CD28 CD | 441 |
| IL15 receptor TM | 426 | CCL26 | 400 | CD137 CD | 443 |
| IL21 receptor TM | 429 | CCL27 | 401 | PD1 CD | 445 |
| IL23 receptor TM | 432 | CCL28 | 402 | PDL1 CD | 447 |
| IL2 | 448 | Lymphotactin | 403 | IL21 | 452 |
| IL7 | 449 | CX3CL1 | 404 | IL23 | 453 |
| IL12 | 450 | Hif VHL-interaction | 457 | IL33 | 454 |
| | | domain:Hif amino | | | |
| | | acid 344-417 | | | |
| IL15 | 451 | Hif amino acid 380- | 458 | TNFα | 455 |
| | | 603 | | | |
| siglec-15 antigen 2 | 460 | siglec-15 antigen 1 | 459 | IFNγ point mutation | 456 |
| siglec-15 antigen 3 | 461 | siglec-15 antigen 6 | 464 | GS linker sequence | 467 |
| siglec-15 antigen 4 | 462 | siglec-15 antigen 7 | 465 | EA linker sequence | 468 |
| siglec-15 antigen 5 | 463 | siglec-15 antigen 8 | 466 | NFAT6x + minimal | 469 |
| | | | | IL12 promoter | |
| IL12&IFN-γ | 470 | IFN-γ&IL12 | 471 | IL12-VHL 1 | 472 |
| IL12-VHL 2 | 473 | IFN-γ-VHL1 | 474 | IFN-γ-VHL2 | 475 |
| IL6-VHL1 | 476 | IL6-VHL2 | 477 | IL6& IFN-γ | 478 |
| IFN-γ&IL6 | 479 | IL12&IFN-γm | 480 | IFN-γm&IL12 | 481 |
| IFN-γm-VHL1 | 482 | IFN-γm-VHL2 | 483 | TNFα VHL 1 | 484 |
| TNFαVHL2 | 485 | IL12 &IL6 | 486 | IL6 & IL12 | 487 |
| IL6& IFN-γm | 488 | IFNm-γ&IL6 | 489 | Neo-2/15 | 490 |
| Neo-2/15-VHL 1 | 491 | Neo-2/15-VHL 2 | 492 | IFNβ-VHL 1 | 493 |
| IFNβ-VHL2 | 494 | T2A (GSG residues | 495 | P2A(GSG residues | 496 |
| | | are optional) | | are optional) | |
| E2A(GSG | 497 | F2A(GSG residues | 498 | TCF-LEF response | 510 |
| residues are | | are optional) | | element | |
| optional) | | | | | |
| Stat5 response | 499 | stat5 response | 500 | Stat3 response | 501 |
| element | | element + minimal | | element | |
| | | promoter | | | |
| stat3 response | 502 | Interferon Stimulated | 503 | Interferon Stimulated | 504 |
| element + minimal | | Response Element | | Response Element + | |
| promoter | | | | minimal promoter | |
| AP1 Response | 505 | SMAD Binding | 506 | Serum Response | 507 |
| Element | | Element | | Element | |
| Serum Response | 508 | Cyclic AMP response | 509 | IFNA2 | 511 |
| Factor Response | | element | | | |
| Element | | | | | |
| IFNA4 | 512 | IFNA14 | 518 | IFNA1 | 524 |
| IFNA5 | 513 | IFNA16 | 519 | IFNA21 | |
| IFNA6 | 514 | IFNA17 | 520 | IRF8 | 526 |
| IFNA7 | 515 | IFNB1 | 521 | IRF4 | 527 |
| IFNA8 | 516 | IFNK | 522 | NOTCH2 | 528 |
| IFNA10 | 517 | IFNW1 | | KLF4 | 529 |
| BATF3 | 530 | TCF4 (E2-2) | 531 | hCD19-CAR (4-1BB + | 532 |
| | | | | CD3 zeta) -NATF-IL6- | |
| | | | | 2A-IFNγ | |
| hCD19-CAR (4- | 533 | scFv ACPP | 534 | GUCY2C-CAR | 535 |
| 1BB + CD3 zeta)- | | | | | |
| NATF-IL12-VHL | | | | | |
| Vector | 284 | | | | |
| including CAR | | | | | |
| and IL12 in | | | | | |
| series | | | | | |

TM: Transmembrane domain
CD: cytoplasmic domain
EM: Extracellular daemon

TABLE 3

| transcription | Expression Conditions | |
|---|---|---|
| factors | or notes | Example of constructs |
| Hif1a | hypoxia-induced | Hif1a binding site + minimal |
| | expression | promoter + CDS of IL |
| NFAT | transcription factor | NFAT binding site + minimal |
| | in an immune response | promoter + CDS of IL |
| FOXP3 | transcription factor | FOXP3 binding site + minimal |
| | in T-reg | promoter + CDS of IL |
| NFkB | transcription factor | NFkB binding site + minimal |
| | in an immune response | promoter + CDS of IL |

TABLE 4

| isolated | |
|---|---|
| nucleic acid | |
| sequence | Nucleic Acid Construct using Encoded Peptides |
| 1 | CAR + P2A + IL + CD8a Hinge & transmembrane |
| 2 | CAR + P2A + IL + IgG4 Hinge & CH2CH3 & |
| | CD4 transmembrane |
| 3 | CAR + Hypoixa/NFAT/FOXP3/NFkB promoter + |
| | IL + CD8a Hinge & transmembrane |
| 4 | CAR + Hypoixa/NFAT/FOXP3/NFkB promoter + |
| | IL + CD8a IgG4Hinge & CH2CH3 & CD4 |
| | transmembrane |
| 5 | scFv + hinge + transmembrane + 41BB + |
| | cd3zeta + IL receptor cytoplasmic region |
| 6 | scFv + hinge + transmembrane + 41BB + |
| | IL receptor cytoplasmic region + cd3zeta |
| 7 | scFv + hinge + transmembrane + IL receptor |
| | cytoplasmic region +41BB + cd3zeta |

[0260] The present disclosure is further described by reference to the following exemplary embodiments and examples. These exemplary embodiments and examples are provided for purposes of illustration only and are not intended to be limiting unless otherwise specified. Thus, the present disclosure should in no way be construed as being limited to the following exemplary embodiments and examples, but rather, should be construed to encompass any and all variations which become evident as a result of the teaching provided herein.

### EXEMPLARY EMBODIMENTS

[0261] The following are exemplary embodiments:
[0262] 1. An isolated polynucleotide comprising a first polynucleotide and a second or an additional polynucleotide, the first polynucleotide encoding a chimeric antigen receptor (CAR), the second or additional polynucleotide encoding one or more therapeutic agents, the one or more therapeutic agents are or comprise of IFNγ, IL-2, IL-6, IL-7, IL-12, IL-15, IL-17, IL-18, IL-23, or a combination thereof.
[0263] 2. An isolated polynucleotide comprising a first polynucleotide and a second or an additional polynucleotide, the first polynucleotide encoding a chimeric antigen receptor (CAR), the second or additional polynucleotide encoding a therapeutic agent that is or comprises at least one of TNFRSF superfamily member receptor activation antibodies or membrane-bound forms thereof, TNFRSF superfamily member ligands or the membrane-bound form thereof, chemokines or membrane-bound forms thereof, antibodies to the chemokines, antibodies to receptors of the chemokines or the membrane-bound forms thereof, or D28 family's ligands that correspond to the sequences in Table 2-4.
[0264] 3. A population of CAR cells comprising the first polynucleotide and the second or additional polynucleotide of embodiments 1 or 2, wherein the CAR cells comprise lymphocyte, leukocyte, or PBMC.
[0265] 4. The population of CAR cells of embodiment 3, wherein the CAR and the one or more therapeutic agents are produced in the form of a polyprotein, which is cleaved to generate separate CAR and therapeutic agent molecules.
[0266] 5. The population of CAR cells of embodiment 4, wherein the polyprotein comprises a cleavable moiety between the CAR and the therapeutic agent, the cleavable moiety comprises a 2A peptide, the 2A peptide comprises P2A or T2A, and/or the CAR and the therapeutic agent are each constitutively expressed.
[0267] 6. The population of CAR cells of embodiment 3, wherein the CAR cells comprise: a third polynucleotide encoding a second or an additional CAR binding an antigen that is different from the antigen that the first CAR binds, the second or additional CAR binding a solid tumor antigen, and the first CAR binding an antigen of a white blood cell.
[0268] 7. A pharmaceutical composition comprising the population of CAR cells of any one of embodiments 3-6, wherein the pharmaceutical composition is used to treat a patient having a solid tumor and/or lymphoma. For example, the CAR cells are CD19CAR T cells expressing IL-6, IL-12, and/or IFNγ may be used to treat lymphoma.
[0269] 8. A method of inducing or causing a T cell response in a subject in need thereof and/or treating a tumor of the subject, the method comprising administering an effective amount of the composition of embodiment 7 to the subject.
[0270] 9. A modified cell comprising one or more CARs, wherein the cell is engineered to express and secrete a therapeutic agent that is or comprises at least one of IFNγ, IL-2, IL-6, IL-7, IL-12, IL-15, IL-17, IL-18, or IL-23.
[0271] 10. A method of inducing or causing or enhancing T cell response, treating cancer, or enhancing cancer treatment, the method comprising: administrating to a subject in need thereof an effective amount of a composition of T cells comprising one or more CARs, wherein the cell is engineered to express and secrete one or more therapeutic agents, wherein the therapeutic agent is or comprises IFNγ, IL-2, IL-6, IL-7, IL-12, IL-15, IL-17, IL-18, IL-23, or a combination thereof and the T cell response in the subject is enhanced as compared to the T cell response in the subject administered with T cells that do not express or secrete the therapeutic agent.
[0272] 11. A method of inducing or causing or enhancing T cell response, treating cancer, or enhancing cancer treatment, the method comprising: administering to a subject in need thereof an effective amount of the composition of a population of T cells comprising a CAR; and administering to the subject an effective amount of one or more therapeutic agents, wherein the therapeutic agent is or comprises IFNγ, IL-2, IL-6, IL-7, IL-12, IL-15, IL-17, IL-18, IL-23, or a combination thereof, and wherein the T cell response in the subject is enhanced as compared to the T cell response in the subject administered with a population of T cells comprising a CAR without being administered a therapeutic agent.
[0273] 12. The method of embodiment 11, wherein administering an effective amount of the therapeutic agent comprises intravenous delivery of an amount of human IL-6 in the range of about 0.5-50 ug per kilogram of body weight.
[0274] 13. The modified cell or the method of any one of embodiments 9-12, wherein the T cell comprises a second or an additional CAR binding a solid tumor antigen, and the first CAR binds an antigen of a white blood cell.
[0275] 14. The modified cell or the method of embodiment 13, wherein the solid tumor antigen is tMUC 1, PRLR, CLCA1, MUC12, GUCY2C, GPR35, CR1L, MUC 17, TMPRSS11B, MUC21, TMPRSS11E, CD207, SLC30A8, CFC1, SLC12A3, SSTR1, GPR27, FZD10, TSHR, SIGLEC15, SLC6A3, KISS1R, QRFPR, GPR119, CLDN6, UPK2, ADAM12, SLC45A3, ACPP, MUC21, MUC16, MS4A12, ALPP, CEA, EphA2, FAP, GPC3, IL13-Rα2, Mesothelin, PSMA, ROR1, VEGFR-II, GD2, FR-α, ErbB2, EpCAM, EGFRvIII, PSCA, or EGFR, and the antigen of a white blood cell is a B cell antigen. For example, the B cell antigen is CD19, CD20, CD22, or BCMA.
[0276] 15. The isolated polynucleotide, the modified cell, or the method of any one of embodiments 2-14, wherein the therapeutic agent is IL-6 or IL-7.
[0277] 16. The isolated polynucleotide, the modified cell, or the method of any one of embodiments 2-14, wherein the CAR comprises an extracellular domain, a transmembrane domain, and an intracellular domain, the extracellular domain binding an antigen.
[0278] 17. The isolated polynucleotide, the modified cell, or the method of embodiment 16, wherein the intracellular domain comprises a co-stimulatory domain that comprises an intracellular domain of a co-stimulatory molecule selected from the group consisting of CD27, CD28, 4-1BB, OX40, CD30, CD40, PD-1, ICOS, lymphocyte function-associated antigen-1 (LFA-1), CD2, CD7, LIGHT, NKG2C, B7-H3, and any combination thereof.
[0279] 18. The isolated polynucleotide, the modified cell, or the method of embodiment 17, wherein the antigen is Epidermal growth factor receptor (EGFR), Variant III of the epidermal growth factor receptor (EGFRvIII), Human epidermal growth factor receptor 2 (HER2), Mesothelin (MSLN), Prostate-specific membrane antigen (PSMA), Carcinoembryonic antigen (CEA), Disialoganglioside 2 (GD2), Interleukin-13Ra2 (IL13Rα2), Glypican-3 (GPC3), Carbonic anhydrase IX (CAIX), L1 cell adhesion molecule (L1-CAM), Cancer antigen 125 (CA125), Cluster of differentiation 133 (CD133), Fibroblast activation protein (FAP), Cancer/testis antigen 1B (CTAG1B), Mucin 1 (MUC1), Folate receptor-α (FR-α), CD19, FZD10, TSHR, PRLR, Muc 17, GUCY2C, CD207, CD3, CD5, B-Cell Maturation Antigen (BCMA), or CD4.
[0280] 19. The isolated polynucleotide, the modified cell, or the method of any one of embodiments 2-18, wherein the modified cell or T cells comprise a dominant negative form of PD-1 mutant such that PD-1/PDL-1 signaling pathway of the cell is interfered with or blocked.
[0281] 20. The isolated polynucleotide, the modified cell, or the method of any one of embodiments 2-19, wherein the polynucleotide encoding the therapeutic agent is present in the modified cell in a recombinant DNA construct, in an mRNA, or in a viral vector.
[0282] 21. The isolated polynucleotide, the modified cell, or the method of any one of embodiments 2-19, wherein the modified cell comprises an mRNA encoding the therapeutic agent, wherein the mRNA is not integrated into the genome of the modified cell.
[0283] 22. The isolated polynucleotide, the modified cell, or the method of any one of embodiments 2-21, wherein the therapeutic agent corresponds to at least one of sequence listed in Table 2-4.
[0284] 23. The isolated polynucleotide, the modified cell, or the method of any one of embodiments 2-21, wherein the modified cell comprises a polynucleotide comprising a promoter comprising a binding site for a transcription modulator that modulates the expression of the therapeutic agent in the cell.
[0285] 24. The isolated polynucleotide, the modified cell, or the method of embodiment 23, wherein the transcription modulator is or includes Hif1a, NFAT, FOXP3, and/or NFkB.
[0286] 25. The isolated polynucleotide, the modified cell, or the method of embodiment 24, wherein the promoter is responsive to the transcription modulator.
[0287] 26. The isolated polynucleotide, the modified cell, or the method of embodiment 25, wherein the promoter is operably linked to the polynucleotide encoding the therapeutic agent such that the promoter drives expression of the therapeutic agent in the cell.
[0288] 27. The isolated polynucleotide, the modified cell, or the method of embodiment 23, wherein the promoter and the binding site correspond to the sequences listed in Table 2-4.
[0289] 28. An isolated polynucleotide comprising a first polynucleotide and a second polynucleotide, the first polynucleotide encoding a chimeric antigen receptor (CAR), the second polynucleotide encoding a therapeutic agent and a transmembrane domain such that the therapeutic agent is associated or bound to cell membrane. Examples of the isolated polynucleotide are listed in Table 4(1-4)
[0290] 29. A modified cell comprising the isolated polynucleotide of embodiment 28.
[0291] 30. A pharmaceutical composition comprising the population of the cells of embodiment 3.
[0292] 31. A method of inducing or causing T cell response in a subject in need thereof and/or treating a tumor of the subject (e.g., solid tumor and/or lymphoma (e.g., CD19 CAR), the method comprising administering an effective amount of the composition of embodiment 30 to the subject.
[0293] 32. A modified cell comprising a first polynucleotide encoding a CAR, and a second polynucleotide encoding a therapeutic agent and a transmembrane domain such that the therapeutic agent is associated or bound to the membrane of the modified cell.
[0294] 33. The modified cell of any one of embodiments 29-32, wherein the therapeutic agent is a cytokine.
[0295] 34. The modified cell of embodiment 33, wherein the cytokine comprises multiple subunits, the second nucleic acid encodes the multiple subunits, one or more linkers connecting the multiple subunits, and the transmembrane domain.
[0296] 35. The modified cell of embodiment 33, wherein the second polynucleotide comprises a polynucleotide of SEQ ID NO: 283, 284, 286, 288, 290, 292, 294, 296, 298, 300, 302, 304, 306, or 308, or a polynucleotide that encodes an amino acid sequence of SEQ ID NO: 281, 282, 285, 287, 289, 291, 293, 295, 297, 299, 301, 303, 305, 307, 309, 310, 311, 312, or 313.
[0297] 36. The modified cell of embodiment 33, wherein the cytokine is or comprises at least one of IFNγ, IL-2, IL-6, IL-7, IL-12, IL-15, IL-17, IL-18, or IL-23.
[0298] 37. The modified cell of any one of embodiments 29-36, wherein the CAR comprises an extracellular domain, a transmembrane domain, and an intracellular domain, wherein the extracellular domain binds an antigen.
[0299] 38. The modified cell of embodiment 37, wherein the intracellular domain comprises a co-stimulatory domain that comprises an intracellular domain of a co-stimulatory molecule selected from the group consisting of CD27, CD28, 4-1 BB, OX40, CD30, CD40, PD-1, ICOS, lymphocyte function-associated antigen-1 (LFA-1), CD2, CD7, LIGHT, NKG2C, B7-H3, and any combination thereof.
[0300] 39. The modified cell of embodiment 37, wherein the antigen is Epidermal growth factor receptor (EGFR), Variant III of the epidermal growth factor receptor (EGFRvIII), Human epidermal growth factor receptor 2 (HER2), Mesothelin (MSLN), Prostate-specific membrane antigen (PSMA), Carcinoembryonic antigen (CEA), Disialoganglioside 2 (GD2), Interleukin-13Ra2 (IL13Rα2), Glypican-3 (GPC3), Carbonic anhydrase IX (CAIX), L1 cell adhesion molecule (L1-CAM), Cancer antigen 125 (CA125), Cluster of differentiation 133 (CD133), Fibroblast activation protein (FAP), Cancer/testis antigen 1B (CTAG1B), Mucin 1 (MUC1), Folate receptor-α (FR-α), CD19, FZD10, TSHR, PRLR, Muc 17, GUCY2C, CD207, CD3, CD5, B-Cell Maturation Antigen (BCMA), or CD4.
[0301] 40. The modified cell of any one of embodiments 29-39, wherein the second polynucleotide comprises a promoter comprising a binding site for a transcription modulator that modulates the expression of the therapeutic agent in the cell.
[0302] 41. The modified cell of embodiment 40, wherein the transcription modulator is or includes Hif1a, NFAT, FOXP3, and/or NFkB.
[0303] 42. A method of inducing or causing or enhancing T cell response, treating cancer, or enhancing cancer treatment, the method comprising: administrating to a subject in need thereof an effective amount of the composition of the modified cells of any one of embodiments 29-41.
[0304] 43. An isolated polynucleotide encoding a binding molecule comprising an extracellular domain, a transmembrane domain, and an intracellular domain, the extracellular domain binds an antigen, the intracellular domain comprising a cytoplasmic domain of a receptor of a therapeutic agent. Examples of the isolated polynucleotide are listed in Table 4.
[0305] 44. A cell comprising the isolated polynucleotide of embodiment 43.
[0306] 45. A pharmaceutical composition comprising the population of the cells of embodiment 44.
[0307] 46. A method of inducing or causing T cell response in a subject in need thereof and/or treating a tumor of the subject, the method comprising administering an effective amount of the composition of embodiment 45 to the subject.
[0308] 47. A modified cell comprising a binding molecule comprising an extracellular domain, a transmembrane domain, and an intracellular domain, the extracellular domain binds an antigen, the intracellular domain comprising a cytoplasmic domain of a receptor of a therapeutic agent.
[0309] 48. The isolated polynucleotide and the modified cell of any one of embodiments 43-47, wherein the therapeutic agent is a cytokine.
[0310] 49. The isolated polynucleotide and the modified cell of any one of embodiments 43-47, wherein the receptor of the therapeutic agent is or comprises IL12Rβ2, IL18R1, IL123R, GP130, IL15Ra, or IL12Rβ1.
[0311] 50. The isolated polynucleotide and the modified cell of any one of embodiments 43-47, wherein the therapeutic agent is or comprises IFNγ, IL-2, IL-6, IL-7, IL-12, IL-15, IL-17, IL-18, or IL-23.
[0312] 51. The isolated polynucleotide and the modified cell of any one of embodiments 43-47, wherein the cytoplasmic domain of the receptor is or comprises at least one of the amino acid sequences of SEQ ID NOs: 314-319.
[0313] 52. The isolated polynucleotide and the modified cell of any one of embodiments 43-47, wherein the modified cell comprises the isolated polynucleotide comprising any one of the amino acid sequences of SEQ ID NOs: 320-322.
[0314] 53. The isolated polynucleotide and the modified cell of any one of embodiments 43-51, wherein the modified cell comprises an additional polynucleotide, the isolated polynucleotide comprises additional polynucleotide, and the additional polynucleotide encodes 4-1BB domain and CD3 Zeta domain, a polynucleotide encoding the cytoplasmic domain of the receptor is located between the 4-1 BB domain and CD3 zeta domain.
[0315] 54. The isolated polynucleotide and the modified cell of any one of embodiments 43-51, wherein the modified cell comprises an additional polynucleotide, the isolated polynucleotide comprises additional polynucleotide, and the additional polynucleotide encodes 4-1BB domain and CD3 Zeta domain, a polynucleotide encoding the cytoplasmic domain of the receptor is located before the 4-1 BB domain ordered from a N-terminal of the cytoplasmic domain.
[0316] 55. The isolated polynucleotide and the modified cell of any one of embodiments 43-51, wherein the modified cell comprises an additional polynucleotide, the isolated polynucleotide comprises an additional polynucleotide, and the additional polynucleotide encodes a 4-1BB domain and a CD3 Zeta domain, a polynucleotide encoding the cytoplasmic domain of the receptor is located after the CD3 Zeta domain ordered from a N-terminal of the cytoplasmic domain.
[0317] 56. The isolated polynucleotide and the modified cell of any one of embodiments 43-55, wherein the intracellular domain comprises a co-stimulatory domain that comprises an intracellular domain of a co-stimulatory molecule selected from the group consisting of CD27, CD28, 4-1BB, OX40, CD30, CD40, PD-1, ICOS, lymphocyte function-associated antigen-1 (LFA-1), CD2, CD7, LIGHT, NKG2C, B7-H3, and any combination thereof.
[0318] 57. The isolated polynucleotide and the modified cell of embodiment 56, wherein the antigen is Epidermal growth factor receptor (EGFR), Variant III of the epidermal growth factor receptor (EGFRvIII), Human epidermal growth factor receptor 2 (HER2), Mesothelin (MSLN), Prostate-specific membrane antigen (PSMA), Carcinoembryonic antigen (CEA), Disialoganglioside 2 (GD2), Interleukin-13Ra2 (IL13Rα2), Glypican-3 (GPC3), Carbonic anhydrase IX (CAIX), L1 cell adhesion molecule (L1-CAM), Cancer antigen 125 (CA125), Cluster of differentiation 133 (CD133), Fibroblast activation protein (FAP), Cancer/testis antigen 1B (CTAG1B), Mucin 1 (MUC1), Folate receptor-α (FR-α), CD19, FZD10, TSHR, PRLR, Muc 17, GUCY2C, CD207, CD3, CD5, B-Cell Maturation Antigen (BCMA), or CD4.
[0319] 58. The modified cell or the cell of any one of embodiments 44-57, wherein a signaling pathway is activated when the binding molecule binds to the antigen.
[0320] 59. An isolated polynucleotide comprising a first polynucleotide and a second or additional polynucleotide, the first polynucleotide encoding a chimeric antigen receptor (CAR), the second or additional polynucleotide encoding a therapeutic agent that is or comprises at least one of IFNγ, IL-2, IL-6, IL-7, IL-12, IL-15, IL-17, IL-18, or IL-23.
[0321] 60. An isolated polynucleotide comprising a first polynucleotide and a second or additional polynucleotide, the first polynucleotide encoding a chimeric antigen receptor (CAR), the second or additional polynucleotide encoding a therapeutic agent that is or comprises at least one of TNFRSF superfamily member receptor activation antibodies or membrane-bound forms thereof, TNFRSF superfamily member ligands or the membrane-bound form thereof, chemokines or membrane-bound forms thereof, antibodies to the chemokines, or antibodies to receptors of the chemokines or the membrane-bound forms thereof, and D28 family's ligands that correspond to the sequences in Table 2-4.
[0322] 61. A population of CAR cells comprising the polynucleotide and the additional polynucleotide of embodiments 59 or 60, wherein the CAR cells comprise lymphocyte, leukocyte, or PBMC.
[0323] 62. The population of CAR cells of embodiment 61, wherein the CAR and the therapeutic agent are produced in the form of a polyprotein, which is cleaved to generate separate CAR and therapeutic agent molecules.
[0324] 63. The population of CAR cells of embodiment 61 or 62, wherein the polyprotein comprises a cleavable moiety between the CAR and the therapeutic agent, the cleavable moiety comprises a 2A peptide, the 2A peptide comprises P2A or T2A, and/or the CAR and the therapeutic agent are each constitutively expressed.
[0325] 64. The population of CAR cells of any one of embodiments 61-63, wherein the CAR cells comprise: a third polynucleotide encoding an additional CAR binding to an antigen that is different from the CAR, or
   the additional CAR binding a solid tumor antigen, and the CAR binds an antigen of a white blood cell.
[0326] 65. A pharmaceutical composition comprising the population of the CAR cells of any one of embodiments 61-64.
[0327] 66. A method of causing or inducing T cell response in a subject in need thereof and/or treating a tumor of the subject, the method comprising administering an effective amount of the composition of embodiment 65 to the subject.
[0328] 67. A modified cell comprising one or more CARs, wherein the cell is engineered to express and secrete a therapeutic agent that is or comprises at least one of IFNγ, IL-2, IL-6, IL-7, IL-12, IL-15, IL-17, IL-18, or IL-23.
[0329] 68. A use of the composition of T cells comprising one or more CARs for causing, inducing, or enhancing T cell response, treating cancer, or enhancing cancer treatment, comprising: administering an effective amount of the composition of T cells comprising one or more CARs, wherein the cell is engineered to express and secrete a therapeutic agent that is or comprises at least one of IFNγ, IL-2, IL-6, IL-7, IL-12, IL-15, IL-17, IL-18, IL-23, or a combination thereof, and the T cell response is enhanced as compared to administering a composition of T cells that do not express or secrete the therapeutic agent.
[0330] 69. A use of the composition of T cells comprising one or more CARs for causing, inducing, or enhancing T cell response, treating cancer, or enhancing cancer treatment comprising: administering an effective amount of the composition of a population of T cells comprising a CAR; and
   administering an effective amount of a therapeutic agent that is or comprises at least one of IFNγ, IL-2, IL-6, IL-7, IL-12, IL-15, IL-17, IL-18, IL-23, or a combination thereof, wherein the T cell response is enhanced as compared to the administration of CAR T cells without the administration of therapeutic agent.
   70. The use of embodiment 69, wherein the administering the effective amount of the therapeutic agent comprises intravenous delivery of an amount of human IL-6 in the range of about 0.5-50 ug per kilogram of body weight.
   71. The use of any one of embodiments 67-70, wherein the T cell comprises an additional CAR binding a solid tumor antigen, and the CAR binds an antigen of a white blood cell.
   72. The use of embodiment 71, wherein the solid tumor antigen is tMUC 1, PRLR, CLCA1, MUC12, GUCY2C, GPR35, CR1L, MUC 17, TMPRSS11B, MUC21, TMPRSS11E, CD207, SLC30A8, CFC1, SLC12A3, SSTR1, GPR27, FZD10, TSHR, SIGLEC15, SLC6A3, KISS1R, QRFPR, GPR119, CLDN6, UPK2, ADAM12, SLC45A3, ACPP, MUC21, MUC16, MS4A12, ALPP, CEA, EphA2, FAP, GPC3, IL13-Rα2, Mesothelin, PSMA, ROR1, VEGFR-II, GD2, FR-α, ErbB2, EpCAM, EGFRvIII, PSCA, or EGFR, and the B cell antigen is CD19, CD20, CD22, or BCMA.
   73. The isolated polynucleotide, the modified cell, or the use of any one of embodiments 60-72, wherein the therapeutic agent is IL-6 or IL-7.
   74. The isolated polynucleotide, the modified cell, or the use of any one of embodiments 60-72, wherein the CAR comprises an extracellular domain, a transmembrane domain, and an intracellular domain, the extracellular domain binds an antigen.
   75. The isolated polynucleotide, the modified cell, or the use of embodiment 74, wherein the intracellular domain comprises a co-stimulatory domain that comprises an intracellular domain of a co-stimulatory molecule selected from the group consisting of CD27, CD28, 4-1BB, OX40, CD30, CD40, PD-1, ICOS, lymphocyte function-associated antigen-1 (LFA-1), CD2, CD7, LIGHT, NKG2C, B7-H3, and any combination thereof.
   76. The isolated polynucleotide, the modified cell, or the use of embodiment 75, wherein the antigen is Epidermal growth factor receptor (EGFR), Variant III of the epidermal growth factor receptor (EGFRvIII), Human epidermal growth factor receptor 2 (HER2), Mesothelin (MSLN), Prostate-specific membrane antigen (PSMA), Carcinoembryonic antigen (CEA), Disialoganglioside 2 (GD2), Interleukin-13Ra2 (IL13Rα2), Glypican-3 (GPC3), Carbonic anhydrase IX (CAIX), L1 cell adhesion molecule (L1-CAM), Cancer antigen 125 (CA125), Cluster of differentiation 133 (CD133), Fibroblast activation protein (FAP), Cancer/testis antigen 1B (CTAG1B), Mucin 1 (MUC1), Folate receptor-α (FR-α), CD19, FZD10, TSHR, PRLR, Muc 17, GUCY2C, CD207, CD3, CD5, B-Cell Maturation Antigen (BCMA), or CD4.
   77. The isolated polynucleotide, the modified cell, or the use of any one of embodiments 60-76, wherein the modified cell or T cells comprise a dominant negative form of PD-1 mutant such that PD-1/PDL-1 signaling pathway of the cell is interfered or blocked.
   78. The isolated polynucleotide, the modified cell, or the use of any one of embodiments 60-77, wherein the therapeutic agent is present in the modified cell in a recombinant DNA construct, in an mRNA, or in a viral vector.
   79. The isolated polynucleotide, the modified cell, or the use of any one of embodiments 60-77, wherein the modified cell comprises a therapeutic agent mRNA encoding the therapeutic agent, and the mRNA is not integrated into the genome of the modified cell.
   80. The isolated polynucleotide, the modified cell, or the use of any one of embodiments 60-79, wherein the therapeutic agent corresponds to at least one of sequence listed in Table 2-4.
   81. The isolated polynucleotide, the modified cell, or the use of any one of embodiments 60-79, wherein the modified cell comprises a polynucleotide comprising a promoter comprising a binding site for a transcription modulator that modulates the expression of the therapeutic agent in the cell.
   82. The isolated polynucleotide, the modified cell, or the use of embodiment 81, wherein the transcription modulator is or includes Hif1a, NFAT, FOXP3, and/or NFkB.
   83. The isolated polynucleotide, the modified cell, or the use of embodiment 82, wherein the promoter is responsive to the transcription modulator.
   84. The isolated polynucleotide, the modified cell, or the use of embodiment 83, wherein the promoter is operably linked to the polynucleotide encoding the therapeutic agent such that the promoter drives expression of the therapeutic agent in the cell.
   85. The isolated polynucleotide, the modified cell, or the use of embodiment 81, wherein the promoter and the binding site correspond to the sequences listed in Table 2-4.
   86. A modified cell comprising one or more CARs, wherein the cell is engineered to express and secrete a therapeutic agent such as a cytokine, and wherein examples of the modified cell are shown in FIGS. 5-10, and 55, 56.
   87. A method of causing, inducing, or enhancing T cell response, treating cancer, or enhancing cancer treatment, the method comprising: administrating an effective amount of the composition of T cells comprising one or more CARs, wherein the cell is engineered to express and secrete a therapeutic agent such as a cytokine.
   88. The modified cell or the method of embodiment 86 or 87, wherein the therapeutic agent that is or comprises IFN-γ.
   89. The modified cell or the method of any one of embodiments 86-88, wherein the therapeutic agent that is or comprises IL-6, IFN-γ, or a combination thereof, wherein the therapeutic agent comprises SEQ ID NO: 287 or 328.
   90. The modified cell or the method of any one of embodiments 86-89, wherein the therapeutic agent that is or comprises IL-15, IL-12, or a combination thereof.
   91. The modified cell or the method of any one of embodiments 86-90, wherein the small protein or the therapeutic agent is or comprises a recombinant or native cytokine.
   92. The modified cell or the method of any one of embodiments 86-91, wherein the therapeutic agent comprises a FC fusion protein associated with a small protein.
   93. The modified cell or the method of any one of embodiments 86-92, wherein the small protein is or comprises IL-12, IL-15, IL-6, IFN-γ, or a combination thereof.
   94. The modified cell or the method of any one of embodiments 86-93, wherein expression and/or secretion is regulated by a controlling system such as an inducible expression system, or the modified cell is regulated by an inducible suicide expression.
   95. The modified cell or the method of any one of embodiments 86-94, wherein the therapeutic agent activates macrophages and/or dendritic cells.
   96. The modified cell or the method of any one of embodiments 86-95, wherein the therapeutic agent causes or promotes macrophages to remove granulocytes.
   97. The modified cell or the method of any one of embodiments 86-96, wherein the therapeutic agent inhibits or suppresses growth of cancer cells.
   98. The modified cell or the method of any one of embodiments 86-97, wherein the therapeutic agent is or comprises a recombinant or a native protein.
   99. The modified cell or the method of any one of embodiments 86-98, wherein the modified cell comprises a modified programmed cell death protein 1 (PD-1) that is a dominant negative form of PD-1.
   100. The modified cell or the method of any one of embodiments 86-99, wherein the one or more CARs comprise a CAR targeting a tumor cell.
   101. The modified cell or the method of any one of embodiments 86-100, wherein the one or more CARs comprise a CAR binding a solid tumor antigen and an additional CAR binding a blood cell antigen such as a B cell antigen.
   102. The modified cell or the method of any one of embodiments 86-100, wherein the solid tumor antigen is tMUC 1, PRLR, CLCA1, MUC12, GUCY2C, GPR35, CR1L, MUC 17, TMPRSS11B, MUC21, TMPRSS11E, CD207, SLC30A8, CFC1, SLC12A3, SSTR1, GPR27, FZD10, TSHR, SIGLEC15, SLC6A3, KISS1R, QRFPR, GPR119, CLDN6, UPK2, ADAM12, SLC45A3, ACPP, MUC21, MUC16, MS4A12, ALPP, CEA, EphA2, FAP, GPC3, IL13-Rα2, Mesothelin, PSMA, ROR1, VEGFR-II, GD2, FR-α, ErbB2, EpCAM, EGFRvIII, or EGFR, and the B cell antigen is CD19, CD20, CD22, or BCMA.
   103. The modified cell or the method of any one of embodiments 86-102, wherein the solid tumor antigen comprises B7, CAIX, CD123, CD133, CD171, CD171/L1-CAM, CEA, Claudin 18.2, cMet, CS1, CSPG4, Dectin1, EGFR, EGFR vIII, EphA2, ERBB receptors, ErbB T4, ERBB2, FAP, Folate receptor 1, FITC, Folate receptor 1, FSH, GD2, GPC3, HA-1 H/HLA-A2, HER2, IL-11Ra, IL13 receptor a2, IL13R, IL13Rα2 (zetakine), Kappa, Leukemia, LewisY, Mesothelin, MUC1, NKG2D, NY-ESO-1, PSMA, ROR-1, TRAIL-receptor1, or VEGFR2, and the B cell antigen is CD19, CD20, CD22, or BCMA.
   104. The modified cell or the method of any one of embodiments 86-103, wherein the T cell response in a subject administered with the CAR T cells expressing the therapeutic agent is enhanced as compared to the the T cell response in a subject that is administered with CAR T cells that do not express or secrete the therapeutic agent.
   105. The modified cell or the method of any one of embodiments 86-104, wherein the modified cell comprises a polynucleotide encoding hTERT or a nucleic acid encoding SV40LT, or a combination thereof, wherein the polynucleotide encoding hTERT or a nucleic acid encoding SV40LT, or a combination thereof is integrated into the genome of the modified T cell, and the modified T cell constitutively expresses hTERT, SV40LT, or a combination thereof.
   106. The modified cell or the method of any one of embodiments 86-105, wherein expression of the polynucleotide encoding hTERT, a nucleic acid encoding SV40LT, or a combination thereof, is regulated by an inducible expression system, and/or the modified T cell comprises a polynucleotide encoding a suicide gene.
   107. The modified cell or the method of any one of embodiments 86-106, wherein the modified cell is derived from a healthy donor or the subject.
   108. The modified cell or the method of any one of embodiments 86-107, wherein the TRAC gene of the modified cell is inactivated.
   109. The modified cell or the method of any one of embodiments 86-108, wherein the modified cell has a reduced graft-versus-host disease (GVHD) response in a bioincompatible human recipient as compared to the GVHD response of the primary human T cell in response to allogenic CAR T treatment.
   110. The modified cell or the method of any one of embodiments 86-109, wherein the modified cell has reduced amount PD-1 or has a dominant negative form of PD-1 such that an signaling pathway of the PD-1 is blocked.
   111. The modified cell or the method of any one of embodiments 86-110, wherein the modified cell has reduced amount PD-1 or has a dominant negative form of PD-1 such that an signaling pathway of the PD-1 is blocked, the therapeutic agent is IL-12 or IFN-γ, or a combination thereof.
   112. The modified cell or the method of an embodiments 86-111, wherein the modified cell has reduced amount PD-1 or has a dominant negative form of PD-1 such that an signaling pathway of the PD-1 is blocked, the therapeutic agent comprises a CD40 agonist such as CP-870,893 (from Pfizer).
   113. The modified cell or the method of an embodiments 86-112, wherein the modified cell comprises an additional therapeutic agent, the modified cell comprises a polynucleotide encoding the therapeutic agent and an additional polynucleotide encoding the additional therapeutic agent, and the polynucleotide and the additional polynucleotide are connected by an IRES element or a third polynucleotide encoding a 2A peptide.
   114. The modified cell or the method of embodiment 113, wherein the therapeutic agent is IL-6, and the additional therapeutic agent is IFN-γ.
   115. The modified cell or the method of embodiment 113, wherein the therapeutic agent is IL-12, and the additional therapeutic agent is IFN-γ.
   116. The modified cell or the method of embodiment 113, wherein the therapeutic agent is CD40, and the additional therapeutic agent is IFN-γ.
   117. The modified cell or the method of an embodiments 86-116, wherein the modified cell comprises a polynucleotide comprising a promoter comprising a binding site for a transcription modulator that modulates the expression and/or secretion of the therapeutic agent in the cell.
   118. The modified cell or the method of any one of embodiments 86-116, wherein the transcription modulator is or includes Hif1a, NFAT, FOXP3, and/or NFkB.
   119. The modified cell or the method of embodiment 118, wherein the promoter is responsive to the transcription modulator.
   120. The modified cell or the method of any one of embodiments 118-119, wherein the promoter is operably linked to the polynucleotide encoding the therapeutic agent such that the promoter drives expression and/or secretion of the therapeutic agent in the cell.
   121. The modified cell or the method of any one of embodiments 118-120, wherein the promoter comprises at least one of SEQ ID NOs: 323-325.
   122. The modified cell or the method of any one of embodiments 86-120, wherein the modified cell comprises one or more polynucleotides encoding a stimulus response element and encoding one or more CARs and/or the therapeutic agent, and the stimulus response element comprises at least one portion of the cGMP-specific 3′,5′-cyclic phosphodiesterase or a molecule derived of, for example, SEQ ID NO: 329.
   123. The modified cell or the method of embodiment 122, wherein expression of the one or more CARs and/or the therapeutic agent is ligand dependent.
   124. The modified cell or the method of embodiment 122, wherein the one or more CARs and/or the therapeutic agent are destabilized or degraded in the absence of a corresponding ligand.
   125. The modified cell or the method of any one of embodiments 122-124, wherein modified cell comprises one or more polynucleotides encoding at least one portion of the cGMP-specific 3′,5′-cyclic phosphodiesterase or a molecule derived thereof, for example, SEQ ID NO: 329 appended to or associated with the therapeutic agent such that expression of the therapeutic agent is ligand dependent, and the therapeutic agent is or comprises IL6 or IFN-γ, or a combination thereof.
   126. A fusion protein comprising a scFv binding PD-1 or PDL1, a linker, an extracellular domain, a transmembrane domain, and a cytoplasmic domain, wherein the transmembrane domain is selected from the group consisting of a transmembrane domain of a receptor of IL15, IL2, IL7, IL6, IL12, IL18, IL21, IL23, IL33, TNFα, TNFβ, IFNα, IFNγ, IFNβ, and siglec-15 antigen, and the cytoplasmic domain is selected from the group consisting of a cytoplasmic domain of receptor of the receptor of IL15, IL2, IL7, IL6, IL12, IL18, IL21, IL23, IL33, TNFα, TNFβ, IFNα, IFNγ, IFNβ, and siglec-15 antigen, and the extracellular domain is selected from the group consisting of an extracellular domain of the receptor of IL15, IL2, IL7, IL6, IL12, IL18, IL21, IL23, IL33, TNFα, TNFβ, IFNα, IFNγ, IFNβ, and siglec-15 antigen.
   127. A fusion protein comprising a scFv binding PD-1 or PDL1, a linker, a transmembrane domain, and a cytoplasmic domain, wherein the transmembrane domain is selected from the group consisting of a transmembrane domain of a receptor of CD4, CD8, CD28, CD27, CD25, CD137, PD1, PDL1, and siglec-15 antigen, and the cytoplasmic domain is selected from the group consisting of a cytoplasmic domain of receptor of the receptor of CD4, CD8, CD28, CD27, CD25, CD137, PD1 PDL1, and siglec-15 antigen.
   128. A fusion protein comprising a cytokine is selected from the group consisting of IL15, IL2, IL7, IL6, IL12, IL18, IL21, IL23, IL33, TNFα, TNFβ, IFNα, and IFNβ, wherein the transmembrane domain is selected from the group consisting of a transmembrane domain of the receptor of IL15, IL2, IL7, IL6, IL12, IL18, IL21, IL23, IL33, TNFα, TNFβ, IFNα, IFNγ, IFNβ, and siglec-15 antigen, and the cytoplasmic domain is selected from the group consisting of a cytoplasmic domain of receptor of the receptor of IL15, IL2, IL7, IL6, IL12, IL18, IL21, IL23, IL33, TNFα, TNFβ, IFNα, and IFNβ, and the extracellular domain is selected from the group consisting of an extracellular domain of the receptor of IL15, IL2, IL7, IL6, IL12, IL18, IL21, IL23, IL33, TNFα, TNFβ, IFNα, and IFNβ.
   129. A fusion protein comprising a cytokine is selected from the group consisting of IL15, IL2, IL7, IL6, IL12, IL18, IL21, IL23, IL33, TNFα, TNFβ, IFNα, and IFNβ, wherein the transmembrane domain is selected from the group consisting of a transmembrane domain of a receptor of CD4, CD8, CD28, CD27, CD25, CD137, PD1, PDL1, and siglec-15 antigen, and the cytoplasmic domain is selected from the group consisting of a cytoplasmic domain of receptor of the receptor of CD4, CD8, CD28, CD27, CD25, CD137, PD1, PDL1, and siglec-15 antigen. Examples of the fusion protein are shown in FIG. 4.
   130. A fusion protein comprising a binding domain binding a ligand or a receptor of an immune checkpoint molecule and a docking molecule, wherein the immune checkpoint molecule is selected from the group consisting of programmed death 1 (PD-1), cytotoxic T lymphocyte antigen-4 (CTLA-4), B- and T-lymphocyte attenuator (BTLA), T cell immunoglobulin mucin-3 (TIM-3), lymphocyte-activation protein 3 (LAG-3), T cell immunoreceptor with Ig and ITIM domains (TIGIT), leukocyte-associated immunoglobulin-like receptor 1 (LAIRI), natural killer cell receptor 2B4 (2B4), VISTA (its receptor), and CD 160, and the docking molecule associates the binding domain with a cell.
   131. The fusion protein of embodiment 130, wherein the docking molecule comprises a linker, a transmembrane domain, and a cytoplasmic domain.
   132. The fusion protein of embodiment 131, wherein the transmembrane domain is selected from the group consisting of a transmembrane domain of a receptor of IL15, IL2, IL7, IL6, IL12, IL18, IL21, IL23, IL33, TNFα, TNFβ, IFNα, and IFNβ, and the cytoplasmic domain is selected from the group consisting of a cytoplasmic domain of receptor of the receptor of IL15, IL2, IL7, IL6, IL12, IL18, IL21, IL23, IL33, TNFα, TNFβ, IFNα, and IFNβ.
   133. The fusion protein of embodiment 131, wherein the docking molecule further comprises an extracellular domain.
   134. The fusion protein of embodiment 133, wherein the extracellular domain is selected from the group consisting of an extracellular domain of the receptor of 1L15, IL2, IL7, IL6, 1L12, 1L18, 1L21, IL23, IL33, TNFα, TNFβ, IFNα, and IFNβ.
   135. The fusion protein of embodiment 130, wherein the docking molecule comprises a linker, a transmembrane domain, and a cytoplasmic domain.
   136. The fusion protein of embodiment 135, wherein the transmembrane domain is selected from the group consisting of a transmembrane domain of a receptor of CD4, CD8, CD28, CD27, CD25, CD137, PD1, PDL1, and siglec-15 antigen, and the cytoplasmic domain is selected from the group consisting of a cytoplasmic domain of receptor of the receptor of CD4, CD8, CD28, CD27, CD25, CD137, PD1, PDL1, and siglec-15 antigen.
   137. The fusion protein of any one of embodiments 130-136, wherein the binding domain is a scFv.
   138. The fusion protein of embodiment 130, wherein the binding domain is a scFv binding CD80 or CD86.
   139. The fusion protein of embodiment 138, wherein the docking molecule comprises or is a wild type or modified CTLA4 or PD-1.
   140. The fusion protein of embodiment 130, wherein the binding domain is a scFv binding VISTA.
   141. The fusion protein of embodiment 140, wherein the docking molecule comprises or is a wild type or modified VISTA receptor or PD-1.
   142. The fusion protein of embodiment 130, wherein the binding domain is a scFv binding PDL1 or PD1, and/or the docking molecule comprises or is wide type or modified PD-1.
   143. The fusion protein of embodiment 130, wherein the binding domain is a scFv binding B7-H3.
   144. The fusion protein of embodiment 143, wherein the docking molecule comprises or is wild type or modified B7-H3 receptor or PD-1.
   145. A fusion protein comprising a therapeutic agent and a docking molecule, wherein the docking molecule comprises a cytoplasmic domain and a transmembrane domain that associate the therapeutic agent with a cell.
   146. The fusion protein of embodiment 142, wherein the therapeutic agent comprises or is the binding domain of any one of embodiment 126-145 or the cytokine of embodiment 129 or 130.
   147. A polynucleotide encoding the fusion protein of any one of embodiments 126-146.
   148 A modified cell comprising the fusion protein of any one of embodiments 126-148 or the polynucleotide of embodiment 147.
   149. A pharmaceutical composition comprising the population of the modified cells of embodiment 148.
   150. A method of causing or inducing T cell response in a subject in need thereof and/or treating a tumor of the subject, the method comprising administering an effective amount of the composition of embodiment 148 to the subject.
   151. The pharmaceutical composition, the modified cell, and the method of any one of embodiments 148-150, wherein the docking molecule comprises a linker and the linker is a GS linker.
   152. The pharmaceutical composition, the modified cell, and the method of any one of embodiments 148-150, wherein the modified cell comprises a CAR.
   153. The pharmaceutical composition, the modified cell, and the method of any one of embodiments 148-150, wherein the CAR comprises an extracellular domain, a transmembrane domain, and an intracellular domain, the extracellular domain binds an antigen.
   154. The pharmaceutical composition, the modified cell, and the method of any one of embodiments 148-150, wherein the intracellular domain comprises a co-stimulatory domain that comprises an intracellular domain of a co-stimulatory molecule selected from the group consisting of CD27, CD28, 4-1BB, OX40, CD30, CD40, PD-1, ICOS, lymphocyte function-associated antigen-1 (LFA-1), CD2, CD7, LIGHT, NKG2C, B7-H3, and any combination thereof.
   155. The pharmaceutical composition, the modified cell, and the method of any one of embodiments 148-26, wherein the antigen is Epidermal growth factor receptor (EGFR), Variant III of the epidermal growth factor receptor (EGFRvIII), Human epidermal growth factor receptor 2 (HER2), Mesothelin (MSLN), Prostate-specific membrane antigen (PSMA), Carcinoembryonic antigen (CEA), Disialoganglioside 2 (GD2), Interleukin-13Ra2 (IL13Rα2), Glypican-3 (GPC3), Carbonic anhydrase IX (CAIX), L1 cell adhesion molecule (L1-CAM), Cancer antigen 125 (CA125), Cluster of differentiation 133 (CD133), Fibroblast activation protein (FAP), Cancer/testis antigen 1B (CTAG11B), Mucin 1 (MUC1), Folate receptor-α (FR-α), CD19, FZD10, TSHR, PRLR, Muc 17, GUCY2C, CD207, CD3, CD5, B-Cell Maturation Antigen (BCMA), or CD4.
   156. The pharmaceutical composition, the modified cell, and the method of any one of embodiments 151-156, wherein the fusion protein is regulated by an inducible gene expression system.
   157. A fusion protein comprising a cytokine and an oxygen-sensitive polypeptide domain.
   158. The fusion protein of embodiment 157, wherein the oxygen-sensitive polypeptide domain is HIFI alpha, HIF3 alpha, or a polypeptide comprising an amino acid sequence having a sequence identity of over 80%, 90% or 95% with respectively Hif VHL-interaction domain, Hif amino acid 344-417, or Hif amino acid 380-603.
   159. The fusion protein of embodiment 158, wherein the oxygen-sensitive polypeptide domain comprises HIF VHL binding domain.
   160. The fusion protein of embodiment 157, wherein HIF1 alpha is hydroxylated by HIFa specific prolyl hydroxylases (PHDI-3) which are oxygen sensing.
   161. A polynucleotide encoding the fusion of any of embodiments 157-160 or comprising one or more components shown in FIGS. 5-10.
   162. A modified cell comprising the fusion protein of any of embodiments 157-160 and/or the nuclei acid sequence of embodiments 161.
   163. The modified cell of embodiment 162, wherein the fusion protein is regulated by NFAT.
   164. A pharmaceutical composition comprising a population of the modified cells of embodiment 162 or 163.
   165. A method of causing or inducing T cell response in a subject in need thereof and/or treating a tumor of the subject, the method comprising administering an effective amount of the composition of embodiment 164 to the subject.
   166. The modified cell, pharmaceutical composition, or method of any one of embodiments 162-165, wherein the modified cell is lymphocyte, leukocyte, or PBMC; or cells, NK cells, or dendritic cells.
   167. The modified cell, pharmaceutical composition, or method of any one of embodiments 162-166, wherein the modified cell further comprises a Chimeric antigen receptor (CAR) or a modified TCR.
   168. The modified cell, pharmaceutical composition, or method of embodiment 167, wherein the TCR is modified TCR.
   169. The modified cell, pharmaceutical composition, or method of embodiment 167, wherein the TCR is derived from spontaneously occurring tumor-specific T cells in patients.
   170. The modified cell, pharmaceutical composition or method of embodiment 167, wherein the TCR binds a tumor antigen.
   171. The modified cell, pharmaceutical composition or method of embodiment 170, wherein the tumor antigen comprises CEA, gp100, MART-1, p53, MAGE-A3, or NY-ESO-1, or the TCR comprises TCRγ and TCRδ Chains or TCRα and TCRβ chains, or a combination thereof.
   172. The modified cell, pharmaceutical composition or method of embodiment 167, wherein the CAR comprises an extracellular domain, a transmembrane domain, and an intracellular domain, the extracellular domain binding an antigen.
   173. The modified cell, pharmaceutical composition or method of embodiment 172, wherein the intracellular domain comprises a co-stimulatory domain that comprises an intracellular domain of a co-stimulatory molecule selected from the group consisting of CD27, CD28, 4-1BB, OX40, CD30, CD40, PD-1, ICOS, lymphocyte function-associated antigen-1 (LFA-1), CD2, CD7, LIGHT, NKG2C, B7-H3, and any combination thereof.
   174. The modified cell, pharmaceutical composition or method of embodiment 173, wherein the antigen is Epidermal growth factor receptor (EGFR), Variant III of the epidermal growth factor receptor (EGFRvIII), Human epidermal growth factor receptor 2 (HER2), Mesothelin (MSLN), Prostate-specific membrane antigen (PSMA), Carcinoembryonic antigen (CEA), Disialoganglioside 2 (GD2), Interleukin-13Ra2 (IL13Rα2), Glypican-3 (GPC3), Carbonic anhydrase IX (CAIX), L1 cell adhesion molecule (L1-CAM), Cancer antigen 125 (CA125), Cluster of differentiation 133 (CD133), Fibroblast activation protein (FAP), Cancer/testis antigen 1B (CTAG1B), Mucin 1 (MUC1), Folate receptor-α (FR-α), CD19, FZD10, TSHR, PRLR, Muc 17, GUCY2C, CD207, CD3, CD5, B-Cell Maturation Antigen (BCMA), or CD4.
   175. The modified cell, pharmaceutical composition or method of any one of embodiments 162-174, wherein the modified cell or the T cells comprise an additional CAR binding a solid tumor antigen, and the (first) CAR binds an antigen of a white blood cell.
   176. The modified cell, pharmaceutical composition or method of any one of embodiments 162-174, wherein the modified cell or the T cells comprise a dominant negative form of PD-1.
   177. The modified cell, pharmaceutical composition or method of any one of embodiments 162-174, wherein the modified cell or the T cells comprise a modified PD-1 lacking a functional PD-1 intracellular domain.
   178. The modified cell, pharmaceutical composition, or method of any one of embodiments 162-177, wherein the modified cell further comprises a polynucleotide encoding a therapeutic agent.
   179. The modified cell, pharmaceutical composition, or method of any one of embodiments 178, wherein the isolated polynucleotide comprises a promoter comprising a binding site for a transcription modulator that modulates the expression and/or secretion of the therapeutic agent in the cell.
   180. The modified cell, pharmaceutical composition, or method of embodiment 179, wherein the transcription modulator is or includes Hif1a, NFAT, FOXP3, and/or NFkB.
   181. The modified cell, pharmaceutical composition, or method of embodiment 180, wherein the promoter is responsive to the transcription modulator.
   182. The modified cell, pharmaceutical composition, or method of embodiment 180, wherein the promoter is operably linked to the polynucleotide encoding the therapeutic agent such that the promoter drives expression and/or secretion of the therapeutic agent in the cell.
   183. The modified cell, pharmaceutical composition, or method of embodiment 180, wherein expression of the therapeutic agent is regulated by an inducible gene expression system.
   184. The modified cell, pharmaceutical composition, or method of embodiment 183, wherein the inducible gene expression system comprises or is a lac system, a tetracycline system, or a galactose system.
   185. The modified cell, pharmaceutical composition or method of embodiment 183, wherein the inducible gene expression system comprises or is a tetracycline system.
   186. The modified cell, pharmaceutical composition or method of embodiment 185, wherein the inducible gene expression system comprises or is a tetracycline on system, and an inducer of the inducible gene expression system is tetracycline, doxycycline, or an analog thereof.
   187. The modified cell, pharmaceutical composition, or method of any one of embodiments 162-186, wherein the modified cell is a T cell derived from a primary human T cell isolated from a human donor.
   188. The modified cell, pharmaceutical composition, or method of embodiment 187, wherein the cell has a reduced expression of endogenous TRAC gene.
   189. The modified cell, pharmaceutical composition, or method of any one of embodiments 162-186, wherein the modified cell is a T cell derived from a primary human T cell isolated from a subject having cancer.
   190. A composition comprising a first population of cells comprising a first molecule binding a first antigen and a second population of cells comprising a second molecule binding a second antigen, wherein the second antigen is a tumor antigen and the first antigen and second antigen are different antigens, and the first population of cells and/or the second population of cells comprise a polynucleotide encoding a therapeutic agent that is or comprises IL-6 or IFN-γ, or a combination thereof.
   191. The composition of embodiment 190, wherein the first molecule is a first CAR, and the second molecule is a second CAR; or the first molecule is the first CAR, and the second molecule is a TCR.
   192. The composition of embodiment 191, wherein the first population of cells does not comprise the second CAR, and/or the second population of cells does not comprise the first CAR.
   193. The composition of embodiment 192, wherein the composition further comprises a third population of cells comprising one or more polynucleotides encoding the first CAR and the second CAR.
   194. The composition of embodiment 191, wherein: the second population of cells comprises the first CAR, and the first population of cells do not comprise the second CAR; or the first population of cells comprises the second CAR.
   195. The composition of embodiment 194, wherein second population of cells does not comprise the first CAR, and the first population of cells comprise the second CAR.
   196. A method of enhancing expansion of the second population of cells (cells targeting solid tumor and/or lymphoma), the method comprising administering an effective amount of the composition of any one of embodiments 190-195 to a subject having a form of cancer associated with or expresses a tumor antigen.
   197. A method of enhancing T cell response in a subject or treating the subject having cancer, the method comprising administering an effective amount of the composition of any one of embodiments 190-195 to the subject having cancer associated with or expresses a tumor antigen.
   198. A method of enhancing expansion of cells in a subject, the method comprising: contacting cells with a first vector comprising a first polynucleotide encoding the first CAR and a second vector comprising a second polynucleotide encoding the second CAR to obtain the composition of any one of embodiments 190-195; and administering an effective amount of the composition to the subject having a form of cancer associated with or expresses a tumor antigen.
   199. A method of enhancing T cell response in a subject or treating the subject having cancer, the method comprising: introducing into cells with a first vector comprising a first polynucleotide encoding the first CAR and a second vector comprising a second polynucleotide encoding the second CAR to obtain the composition of any one of embodiments 190-195; and administering an effective amount of the composition to the subject having a form of cancer associated with or expresses the tumor antigen.
   200. A method of enhancing expansion of cells in a subject, the method comprising: administering an effective amount of the first population of cells of any one of embodiments 190-195; and administering an effective amount of the second population of cells.
   201. The method of any one of embodiments 198-200, wherein the first vector and the second vector comprise lentiviral vectors.
   202. The composition or the method of any one of embodiments 190-201, wherein the first or second antigen is or comprises a surface molecule of a white blood cell (WBC), a tumor antigen, or a solid tumor antigen.
   203. The composition or the method of any one of embodiments 190-201, wherein the cells are modified T cells, modified NK cells, or modified dendritic cells.
   204. The composition or the method of embodiment 202, wherein the WBC is a granulocyte, a monocyte, or lymphocyte.
   205. The composition or the method of embodiment 204, wherein the WBC is a B cell.
   206. The composition or the method of embodiment 205, wherein the cell surface molecule of the WBC is CD19, CD22, CD20, BCMA, CD5, CD7, CD2, CD16, CD56, CD30, CD14, CD68, CD11b, CD18, CD169, CD1c, CD33, CD38, CD138, or CD13.
   207. The composition or the method of embodiment 202, wherein the cell surface molecule of the WBC is CD19, CD20, CD22, or BCMA.
   208. The composition or the method of embodiment 202, wherein the cell surface molecule of the WBC is CD19.
   209. The composition or the method of embodiment 202, wherein the tumor antigen is a solid tumor antigen.
   210. The composition or the method of embodiment 202, wherein the solid tumor antigen is tMUC1, PRLR, CLCA1, MUC12, GUCY2C, GPR35, CR1L, MUC 17, TMPRSS11B, MUC21, TMPRSS11E, CD207, SLC30A8, CFC1, SLC12A3, SSTR1, GPR27, FZD10, TSHR, SIGLEC15, SLC6A3, KISS1R, QRFPR, GPR119, CLDN6, UPK2, ADAM12, SLC45A3, ACPP, MUC21, MUC16, MS4A12, ALPP, CEA, EphA2, FAP, GPC3, IL13-Rα2, Mesothelin, PSMA, ROR1, VEGFR-II, GD2, FR-α, ErbB2, EpCAM, EGFRvIII, B7-H3, or EGFR.
   211. The composition or the method of embodiment 202, wherein the solid tumor antigen is or comprises tumor associated MUC1.
   212. The composition or the method of any one of embodiments 191-211, wherein the CAR comprises the antigen binding domain, a transmembrane domain, a co-stimulatory domain, and a CD3 zeta domain.
   213. The composition or the method of embodiment 212, wherein the co-stimulatory domain comprises the intracellular domain of CD27, CD28, 4-1BB, OX40, CD30, CD40, PD-1, ICOS, lymphocyte function-associated antigen-1 (LFA-1), CD2, CD7, LIGHT, NKG2C, B7-H3, a ligand that specifically binds with CD83, or a combination thereof.
   214. The composition or the method of embodiment 213, wherein: a co-stimulatory domain of the second CAR comprises or is an intracellular domain of 4-1BB, and a binding domain of the second CAR binds TSHR; and/or a binding domain of the first CAR binds CD19 and a co-stimulatory domain of the second CAR comprises or is an intracellular domain of CD28.
   215. The composition or the method of any one of embodiments 191-214, wherein the first population of cells and/or the second population of cells further comprise a dominant negative form of PD-1.
   216. The composition or the method of embodiment 215, wherein the first population of cells comprise a vector encoding the first CAR and the dominant negative form of PD-1.
   217. The composition or the method of any one of embodiments 191-216, wherein the first CAR comprises a scFv binding TSHR, an intracellular domain of 4-1BB or CD28, and a CD3 zeta domain, and the second CAR comprises a scFv binding CD19, an intracellular domain of 4-1 BB or CD28, and a CD3 zeta domain.
   218. The composition or the method of any one of embodiments 191-217, wherein the first CAR comprises SEQ ID NO: 5, and the second CAR comprises SEQ ID NO: 70.
   219. The composition or the method of any one of embodiments 191-218, wherein the second population of cells comprises a lentiviral vector encoding the first CAR and a therapeutic agent and the first population of cells comprises a lentiviral vector encoding the second CAR and a dominant negative form of PD-1.
   220. The composition or the method of any one of embodiments 191-219, wherein the first population of cells comprises the first CAR and a therapeutic agent and the second population of cells comprises the second CAR and a dominant negative form of PD-1.
   221. The composition or the method of any one of embodiments 219 and 220, wherein the therapeutic agent comprises or is a cytokine.
   222. The composition or the method of embodiment 221, wherein the cytokine is IL6 and/or INFγ.
   223. A method comprising:
   administering an effective amount of a first population of T cells comprising a CAR comprising a scFv binding CD19, an intracellular domain of 4-1 BB or CD28, CD3 zeta domain to the patient, thereby enhancing expansion of the first population of T cells in the patient; and
   administering an effective amount of a second population of T cells comprising a CAR comprising a scFv binding TSHR to a patient having cancer, an intracellular domain of 4-1BB or CD28, and a CD3 zeta domain.
   224. The method of embodiment 223, wherein first population of cells further comprise an additional CAR comprising the scFv binding tMUC1, the intracellular domain of 4-1BB or CD28, and the CD3 zeta domain.
   225. The method of embodiment 223, wherein the second population of cells does not comprise the scFv binding CD19.
   226. The method of embodiment 223, wherein the first population of cells does not comprise the scFv binding TSHR.
   227. The composition of embodiment 190, wherein the first molecule is a modified TCR.
   228. The composition of embodiment 227, wherein the TCR is derived from spontaneously occurring tumor-specific T cells in patients.
   229. The composition of embodiment 227, wherein the TCR binds a tumor antigen.
   230. The composition of embodiment 227, wherein the tumor antigen comprises CEA, gp100, MART-1, p53, MAGE-A3, or NY-ESO-1, or the TCR comprises TCRγ and TCRδ chains, or TCRα and TCRβ chains, or a combination thereof.
   231. The modified cell, pharmaceutical composition or method of any one of embodiments 190-230, wherein the modified cell is a T cell derived from a primary human T cell isolated from a human donor.
   232. The modified cell, pharmaceutical composition, or method of embodiment 231, wherein the cell has a reduced expression of endogenous TRAC gene.
   233. The modified cell, pharmaceutical composition or method of any one of embodiments 190-230, wherein the modified cell is a T cell derived from a primary human T cell isolated from a subject having cancer.
   234. The isolated polynucleotide, the population of CAR cells, the pharmaceutical composition, or the method of any one of embodiments 190-233, wherein the polynucleotide comprises a first polynucleotide encoding IL6 and a second polynucleotide encoding IFN-γ, and the first polynucleotide and the second polynucleotide are connected by an IRES element or a third polynucleotide encoding a 2A peptide.
   235. The isolated polynucleotide, the population of CAR cells, the pharmaceutical composition, or the method of any one of embodiments 190-234, wherein the polynucleotide is or comprises the polynucleotide encoding one or more amino acid sequences of SEQ ID NOs: 287 and/or 328, or a combination thereof.
   236. The isolated polynucleotide, the population of CAR cells, the pharmaceutical composition, or the method of any one of embodiments 190-235, wherein expression of the polynucleotide is regulated by a conditional expression system such that the therapeutic agent is expressed in response to binding of a target antigen; or
   the isolated polynucleotide, the population of CAR cells, the pharmaceutical composition, or the method of one of embodiments 1-47, wherein expression of the additional polynucleotide is regulated by SynNotch polypeptide.
   237. The isolated polynucleotide, the population of CAR cells, the pharmaceutical composition, modified cell, or the method of any one of embodiments 190-236, wherein T cell response in a subject administered with T cells expressing or secreting the therapeutic agent is enhanced as compared to the T cell response in a subject administered with T cells that do not express or secrete the therapeutic agent, or the T cell response in a subject administered with CAR T cells and the therapeutic agent is enhanced as compared with T cell response in a subject administered with CAR T cells without the administration of therapeutic agent.
   238. The isolated polynucleotide, the population of CAR cells, the pharmaceutical composition, modified cell, or the method of any one of embodiments 190-237, wherein expression and/or secretion of the therapeutic agent is regulated by an inducible expression system and/or the modified cell comprises a polynucleotide encoding an inducible suicide system.
   239. The isolated polynucleotide, the population of CAR cells, the pharmaceutical composition, modified cell, or the method of embodiments 190-49, wherein a range of concentration values of IL6 is 60 to 5000 pg/ml, 200-5000 pg/ml, or 2000-5000 pg/ml in the blood of the subject.
   240. The isolated polynucleotide, the population of CAR cells, the pharmaceutical composition, modified cell, or the method of any one of embodiments 190-239, wherein a range of concentration values IFN-γ is 20 to 5000 pg/ml, 200 to 5000 pg/ml, or 500 to 5000 pg/ml in the blood of the subject.
   241. The isolated polynucleotide, the population of CAR cells, the pharmaceutical composition, modified cell, or the method of any one of embodiments 190-240, wherein the modified cell comprises a polynucleotide comprising a binding site for a transcription modulator that modulates the expression and/or secretion of the therapeutic agent in the cell.
   242. The isolated polynucleotide, the population of CAR cells, the pharmaceutical composition, modified cell, or the method of embodiment 241, wherein the transcription modulator is or includes Hif1a, NFAT, FOXP3, and/or NFkB, and the promoter is responsive to the transcription modulator.
   243. The isolated polynucleotide, the population of CAR cells, the pharmaceutical composition, modified cell, or the method of embodiment 241, wherein the promoter is operably linked to the polynucleotide encoding the therapeutic agent such that the promoter drives 57 and/or secretion of the therapeutic agent in the cell.
   244. The isolated polynucleotide, the population of CAR cells, the pharmaceutical composition, modified cell, or the method of any one of embodiments 241-243, wherein the promoter comprises at least one of SEQ ID NOs: 332, 333, 341, 469, or 342.
   245. The isolated polynucleotide, the population of CAR cells, the pharmaceutical composition, modified cell, or the method of any one of embodiments 190-57, wherein the first and second population of cells comprises TSHR-CAR (scFv of the CAR: SEQ ID NO: 8): and hCD19-CAR-NATF-IL6-2A-IFNγ (scFv of CD19 CAR: SEQ ID 5; amino acid sequence (aa) of NATF: SEQ ID: 469; aa of IL6: SEQ ID NO: 287; 2A is SEQ ID NO: 327: and aa of IFN-γ: SEQ ID NO: 328).
   246. An isolated polynucleotide comprising a polynucleotide and an additional polynucleotide, the polynucleotide encoding a chimeric antigen receptor (CAR), the additional polynucleotide encoding a therapeutic agent that is or comprises IL-6 or IFN-γ, or a combination thereof.
   247. A population of CAR cells comprising the polynucleotide and the additional polynucleotide of embodiments 246, wherein the CAR cells comprise lymphocyte, leukocyte, or PBMC.
   248. The population of CAR cells of embodiment 247, wherein the CAR and the therapeutic agent are produced in the form of a polyprotein, which is cleaved to generate separate CAR and therapeutic agent molecules.
   249. The population of CAR cells of any one of embodiments 247-248, wherein the polyprotein comprises a cleavable moiety between the CAR and the therapeutic agent, the cleavable moiety comprises a 2A peptide, the 2A peptide comprises P2A or T2A, and/or the CAR and the therapeutic agent are each constitutively expressed.
   250. The population of CAR cells of any one of embodiments 247-249, wherein the CAR cells comprise:
   a third polynucleotide encoding an additional CAR binding to an antigen that is different from an antigen that the CAR binds, or the additional CAR binding a solid tumor antigen, and the CAR binds an antigen of a white blood cell.
   251. A pharmaceutical composition comprising the population of the CAR cells of any one of embodiments 247-250.
   252. A method of causing or inducing T cell response in a subject in need thereof and/or treating a tumor of the subject, the method comprising administering an effective amount of the composition of embodiment 251 to the subject.
   253. The isolated polynucleotide, the population of CAR cells, the pharmaceutical composition, or the method of any one of embodiments 246-252, wherein the additional polynucleotide comprises a first polynucleotide encoding IL6 and a second polynucleotide encoding IFN-γ, and the first polynucleotide and the second polynucleotide are connected by an IRES element or a third polynucleotide encoding a 2A peptide.
   254. The isolated polynucleotide, the population of CAR cells, the pharmaceutical composition, or the method of any one of embodiments 246-253, wherein the additional polynucleotide is or comprises the polynucleotide of SEQ ID NOs: 287 or 328, or a combination thereof.
   255. The isolated polynucleotide, the population of CAR cells, the pharmaceutical composition, or the method of any one of embodiments 246-254, wherein expression of the additional polynucleotide is regulated by a conditional expression system such that the therapeutic agent is expressed in response to binding of a target antigen, and/or wherein expression of the additional polynucleotide is regulated by SynNotch polypeptide.
   256. A modified cell comprises one or more CARs, wherein the cell is engineered to express and secrete a therapeutic agent that is or comprises IL-6 or IFN-γ, or a combination thereof.
   257. A method of causing, inducing, or enhancing T cell response, treating cancer, or enhancing cancer treatment, the method comprising: administrating an effective amount of a composition of T cells comprising one or more CARs, wherein the cell is engineered to express and secrete a therapeutic agent that is or comprises IL-6 or IFN-γ, or a combination thereof.
   258. A method of causing, inducing, or enhancing T cell response, treating cancer, or enhancing cancer treatment, the method comprising:
   administering an effective amount of the composition of a population of T cells comprising a CAR; and
   administering an effective amount of a therapeutic agent that is or comprises IL-6 or IFN-γ, or a combination thereof.
   259. The modified cell or the method of any one of embodiments 252, 257, and 258, wherein T cell response is enhanced in the subject administered with T cells that express or secrete the therapeutic agent as compared to the T cell response in the subject administered with T cells that do not express or secrete the therapeutic agent, or the T cell response is enhanced in the subject administered with CAR T cells and the therapeutic agent as compared to the T cell response in the subject administered with CAR T cells without the administration of therapeutic agent.
   260. The modified cell or the method of any one of embodiments 256-259, wherein expression and/or secretion of the therapeutic agent is regulated by an inducible expression system and/or the modified cell comprises a polynucleotide encoding an inducible suicide system.
   261. The modified cell or the method of any one of embodiments 256-259, wherein a range of concentration values of IL6 is 60 to 5000 pg/ml, 200-5000 pg/ml, or 2000-5000 pg/ml in the blood of the subject.
   262. The modified cell or the method of any one of embodiments 256-259, wherein a range of concentration values IFN-γ is 20 to 5000 pg/ml, 200 to 5000 pg/ml, or 500 to 5000 pg/ml in the blood of the subject.
   263. The modified cell or the method of any one of embodiments 256-262, wherein the administering the effective amount of the therapeutic agent comprises intravenous delivery of an amount of human IL-6 in the range of about 0.5-50 ug per kilogram of body weight.
   264. The modified cell or the method of any one of embodiments 256-263, wherein the modified cell or the T cells comprise an additional CAR binding a solid tumor antigen, and the (first) CAR binds an antigen of a white blood cell.
   265. The modified cell or the method of embodiment 264, wherein the solid tumor antigen is tMUC 1, PRLR, CLCA1, MUC12, GUCY2C, GPR35, CR1L, MUC 17, TMPRSS11B, MUC21, TMPRSS11E, CD207, SLC30A8, CFC1, SLC12A3, SSTR1, GPR27, FZD10, TSHR, SIGLEC15, SLC6A3, KISS1R, QRFPR, GPR119, CLDN6, UPK2, ADAM12, SLC45A3, ACPP, MUC21, MUC16, MS4A12, ALPP, CEA, EphA2, FAP, GPC3, IL13-Rα2, Mesothelin, PSMA, ROR1, VEGFR-II, GD2, FR-α, ErbB2, EpCAM, EGFRvIII, PSCA, or EGFR, and the white blood cells is a B cell antigen and the B cell antigen is CD19, CD20, CD22, or BCMA.
   266. The modified cell or the method of any one of embodiments 256-265, wherein the modified cell or the T cells comprise a dominant negative form of PD-1.
   267. The modified cell or the method of any one of embodiments 259-266, wherein the modified cell or the T cells comprise a modified PD-1 lacking a functional PD-1 intracellular domain.
   268. The isolated polynucleotide, the population of CAR cells, the pharmaceutical composition, modified cell, or the method of any one of embodiments 246-267, wherein the CAR comprises an extracellular domain, a transmembrane domain, and an intracellular domain, the extracellular domain binds an antigen.
   269. The isolated polynucleotide, the population of CAR cells, the pharmaceutical composition, modified cell, or the method of any one of embodiments 246-268, wherein the intracellular domain comprises a co-stimulatory domain that comprises an intracellular domain of a co-stimulatory molecule selected from the group consisting of CD27, CD28, 4-1BB, OX40, CD30, CD40, PD-1, ICOS, lymphocyte function-associated antigen-1 (LFA-1), CD2, CD7, LIGHT, NKG2C, B7-H3, and one combination thereof.
   270. The isolated polynucleotide, the population of CAR cells, the pharmaceutical composition, modified cell, or the method of any one of embodiments 246-269, wherein the antigen is Epidermal growth factor receptor (EGFR), Variant III of the epidermal growth factor receptor (EGFRvIII), Human epidermal growth factor receptor 2 (HER2), Mesothelin (MSLN), Prostate-specific membrane antigen (PSMA), Carcinoembryonic antigen (CEA), Disialoganglioside 2 (GD2), Interleukin-13Ra2 (IL13Rα2), Glypican-3 (GPC3), Carbonic anhydrase IX (CAIX), L1 cell adhesion molecule (L1-CAM), Cancer antigen 125 (CA125), Cluster of differentiation 133 (CD133), Fibroblast activation protein (FAP), Cancer/testis antigen 1B (CTAG1B), Mucin 1 (MUC1), Folate receptor-α (FR-α), CD19, FZD10, TSHR, PRLR, Muc 17, GUCY2C, CD207, CD3, CD5, B-Cell Maturation Antigen (BCMA), or CD4.
   271. The isolated polynucleotide, the population of CAR cells, the pharmaceutical composition, modified cell, or the method of any one of embodiments 246-270, wherein the therapeutic agent is present in the modified cell in a recombinant DNA construct, in an mRNA, or in a viral vector.
   272. The isolated polynucleotide, the population of CAR cells, the pharmaceutical composition, modified cell, or the method of any one of embodiments 246-271, wherein the modified cell comprises a therapeutic agent mRNA encoding the therapeutic agent, and the mRNA is not integrated into the genome of the modified cell.
   273. The isolated polynucleotide, the population of CAR cells, the pharmaceutical composition, modified cell, or the method of any one of embodiments 246-272, wherein the modified cell comprises a polynucleotide comprising a promoter comprising a binding site for a transcription modulator that modulates the expression and/or secretion of the therapeutic agent in the cell.
   274. The isolated polynucleotide, the population of CAR cells, the pharmaceutical composition, modified cell, or the method of embodiment 273, wherein the transcription modulator is or includes Hif1a, NFAT, FOXP3, and/or NFkB.
   275. The isolated polynucleotide, the population of CAR cells, the pharmaceutical composition, modified cell, or the method of embodiment 273, wherein the promoter is responsive to the transcription modulator.
   276. The isolated polynucleotide, the population of CAR cells, the pharmaceutical composition, modified cell, or the method of embodiment 273, wherein the promoter is operably linked to the polynucleotide encoding the therapeutic agent such that the promoter drives expression and/or secretion of the therapeutic agent in the cell.
   277. The isolated polynucleotide, the population of CAR cells, the pharmaceutical composition, modified cell, or the method of any one of embodiments 273-276, wherein the promoter comprises at least one of SEQ ID NOs: 323-325.
   278. A method of using any one of the preceding embodiments (1-277) in autologous T cell therapy, allogenic T cell therapy, TCR T cell therapy, or NK cell therapy.
   279. The CAR described in any one of the preceding embodiments (1-278), wherein the CAR comprises one or more of the complementarity determining regions (CDRs) that bind an antigen of interest.
   280. A polynucleotide encoding one or more therapeutic agents comprising at least two cytokines.
   281. A modified cell comprising a polynucleotide encoding one or more therapeutic agents.
   282. A method for enhancing T cell response (e.g., expansion and/or activation) in vitro and/or in vivo, the method comprising: introducing a polynucleotide encoding one or more therapeutic agents to obtain a modified cell; culturing the modified cell to obtain a population of modified cells; and contacting the population of modified cells with cells including an antigen, wherein the modified cells enhance the T cell response as compared to the cell contacted with modified cells not comprising the polynucleotide.
   283. The polynucleotide, modified cell, or method of any one of embodiments 280-282, wherein the one or more therapeutic agents comprise at least two of IL6, IL12, or IFNγ.
   284. The polynucleotide, modified cell, or method of any one of embodiments 280-282, wherein the one or more therapeutic agents comprise at least IL12 and IFNγ.
   285. The polynucleotide, modified cell, or method of any one of embodiments 280-282, wherein the one or more therapeutic agents comprise at least two of IL12, IL6, IFNγ, IFNβ, TNFα, or Neo-2/15.
   286. The modified cell of embodiment 281, wherein the modified cell comprises a polynucleotide encoding IL12 and IFNγ.
   287. The modified cell of embodiment 281, wherein the modified cell comprises a polynucleotide encoding TNFα.
   288. The modified cell of embodiment 287, wherein the polynucleotide encoding TNFα is linked to a HIF VHL binding domain.
   289. The polynucleotide, modified cell, or method of any one of embodiments 283-288, wherein the one or more therapeutic agents comprise at least one cytokine associated with an oxygen-sensitive polypeptide domain.
   290. The polynucleotide, modified cell, or method of embodiment 289, wherein the oxygen-sensitive polypeptide domain comprises a HIF VHL binding domain.
   291. The polynucleotide, modified cell, or method of embodiment 289, wherein the oxygen-sensitive polypeptide domain is or comprises SEQ ID NO: 457.
   292. The polynucleotide, modified cell, or method of embodiment 289, wherein the polynucleotide encodes a cytokine, an EA linker, and SEQ ID NO: 457.
   293. The polynucleotide, modified cell, or method of embodiment 289, wherein the polynucleotide encodes or the modified cell comprises at least one of SEQ ID NO: 470-489 or 491-495.
   294. The polynucleotide, modified cell, or method of any one of embodiments 280-293, wherein the polynucleotide comprises a promoter comprising a binding site for a transcription modulator that modulates the expression and/or secretion of the therapeutic agent in the cell.
   295. The polynucleotide, modified cell, or method of embodiment 294, wherein the transcription modulator is or includes Hif1a, NFAT, FOXP3, and/or NFkB.
   296. The polynucleotide, modified cell, or method of any one of embodiments 280-295, wherein the polynucleotide encodes a binding molecule.
   297. The modified cell or method of any one of embodiments 280-296, wherein the binding molecule is CAR or TCR.
   298. The polynucleotide, modified cell, or method of embodiment 297, wherein the polynucleotide is present in the modified cell in a recombinant DNA construct, in an mRNA, or in a viral vector.
   299. The polynucleotide, modified cell, or method of embodiment 298, wherein the polynucleotide is an mRNA, which is not integrated into the genome of the modified cell.
   300. The polynucleotide, modified cell, or method of any one of embodiments 280-299, wherein the polynucleotide comprises a sequence encoding a cleavable peptide (e.g., 2A peptide or IRES), which is disposed between the at least two cytokines.
   301. A composition for treating a subject having cancer, the composition comprising a first population of cells and a second population of cells, wherein the first population of cells comprising a polynucleotide encoding a binding molecule binding a solid tumor antigen, a second population of cells comprising the polynucleotide of any one of embodiments 280-300.
   302. The composition of embodiment 301, wherein the polynucleotide comprises a sequence encoding CAR binding CD19, a sequence encoding IL6, and a sequence encoding IFNγ.
   303. The composition of embodiment 301, wherein the polynucleotide comprises a sequence encoding CAR binding CD19, a sequence encoding IL12, and a sequence encoding IFNγ.
   304. The composition of embodiment 301, wherein the binding molecule is a CAR or a TCR.
   305. The composition of embodiment 301, wherein the first population of cells comprises a polynucleotide encoding TNFα that is linked to a HIF VHL binding domain.
   306. A composition for treating a subject having cancer, the composition comprising a first population of cells and a second population of cells, wherein the first population of cells comprising a polynucleotide encoding a binding molecule binding a white blood antigen, a second population of cells comprising the polynucleotide of any one of embodiments 280-300.
   307. The composition of embodiment 306, wherein the polynucleotide comprises a sequence encoding a binding molecule binding a solid tumor antigen, a sequence encoding IL6, and a sequence encoding IFNγ.
   308. The composition of embodiment 306, wherein the polynucleotide comprises a sequence encoding a binding molecule binding a solid tumor antigen, a sequence encoding IL12, and a sequence encoding IFNγ.
   309. The composition of any one of embodiments 306-308, wherein the binding molecule is a CAR or a TCR.
   310. The composition of embodiment 306, wherein the first population of cells comprise a polynucleotide encoding TNFα that is linked to a HIF VHL binding domain.
   311. A method of causing or inducing a T cell response, enhancing the T cell response, treating a subject having cancer, or enhancing the treatment, the method comprising: administering an effective amount of the composition of any one of embodiments 301-310 to a subject having cancer.
   312. A cell modified to express one or more molecules at a level that is higher than the level of the one or more molecules expressed by a cell that has not been modified to express the one or more molecules, wherein the one or more molecules comprise a cytokine (for example, IFN-γ, IL-12, and IL-6) or a derivatives thereof.
   313. A modified cell comprising an antigen binding molecule and one or more molecules, wherein expression and/or function of one or more molecules in the modified cell has been enhanced, wherein the one or more molecules comprise a cytokine (for example, IFN-γ, IL-12, and IL-6).
   314. The modified cell of any one of embodiments 312 and 313, wherein the modified cell comprises a disruption in an endogenous gene or an addition of an exogenous gene that is associated with a biosynthesis or transportation pathway of the one or more molecules.
   315. A method or use of polynucleotide, the method comprising providing a viral particle (e.g., AAV, lentivirus or their variants) comprising a vector genome, the vector genome comprising the polynucleotide encoding one more cytokines and a polynucleotide encoding a binding molecule, the polynucleotide operably linked to an expression control element conferring transcription of the polynucleotides; and administering an amount of the viral particle to a subject such that the polynucleotide is expressed in the subject. Examples of cytokines include IFN-γ, IL-12, and IL-6.
   316. The method of embodiment 315, wherein the AAV preparation may include AAV vector particles, empty capsids and host cell impurities, thereby a 2A peptide providing an AAV product substantially free of AAV empty capsids.
   317. A pharmaceutical composition comprising the population of the cells of any one of embodiments 312-314.
   318. A method of causing or eliciting T cell response in a subject in need thereof and/or treating a tumor of the subject, the method comprising administering an effective amount of the composition of embodiment 317 to the subject.
   319. A method of enhancing a cell therapy, the method comprising administering an effective amount of the composition of embodiment 317 to the subject, wherein a number of M2 macrophages in the subject has been reduced as compared to the M2 macrophages in the subject administered with an effective amount of the modified cells of which expression of IFN-γ has not been enhanced, wherein the cytokine is IFNγ.
   320. A method of reducing a number of M2 macrophages, the method comprising contacting M2 macrophages with an effective amount of the composition of embodiment 317 to the subject, wherein a number of M2 macrophages in the subject has been reduced as compared to M2 macrophages in the subject administered with an effective amount of the modified cells of which expression of IFN-γ has not been enhanced, wherein the cytokine is IFNγ.
   321. The method of any one of embodiments 319 and 320, wherein the expression of IFN-γ is regulated such that the modified cells express a higher level of IFN-γ in response to activation of the modified cells.
   322. An isolated polynucleotide encoding one or more molecules comprising IFN-γ.
   323. The isolated polynucleotide, modified cell, method, or pharmaceutical composition of any one of embodiments 312-322, wherein the one or more molecules further comprise IL-16.
   324. The modified cell of any one of embodiments 312-323, wherein the modified cell comprises the antigen binding molecule, wherein the antigen binding molecule is a chimeric antigen receptor (CAR), which comprises an antigen-binding domain, a transmembrane domain, and an intracellular signaling domain.
   325. The modified cell of embodiment 324, wherein the antigen-binding domain binds a tumor antigen selected from a group consisting of TSHR, CD19, CD123, CD22, CD30, CD171, CS-1, CLL-1, CD33, EGFRvIII, GD2, GD3, BCMA, Tn Ag, PSMA, ROR1, FLT3, FAP, TAG72, CD38, CD44v6, CEA, EPCAM, B7H3, KIT, IL-13Rα2, Mesothelin, IL-11Ra, PSCA, PRSS21, VEGFR2, LewisY, CD24, PDGFR-beta, SSEA-4, CD20, Folate receptor alpha, ERBB2 (Her2/neu), MUC1, EGFR, NCAM, Prostase, PAP, ELF2M, Ephrin B2, IGF-I receptor, CAIX, LMP2, gp100, bcr-abl, tyrosinase, EphA2, Fucosyl GM1, sLe, GM3, TGS5, HMWMAA, o-acetyl-GD2, Folate receptor beta, TEM1/CD248, TEM7R, CLDN6, GPRC5D, CXORF61, CD97, CD179a, ALK, Polysialic acid, PLAC1, GloboH, NY-BR-1, UPK2, HAVCR1, ADRB3, PANX3, GPR20, LY6K, OR51E2, TARP, WT1, NY-ESO-1, LAGE-1a, MAGE-A1, legumain, HPV E6, E7, MAGE A1, ETV6-AML, sperm protein 17, XAGE1, Tie 2, MAD-CT-1, MAD-CT-2, Fos-related antigen 1, p53, p53 mutant, prostein, survivin and telomerase, PCTA-1/Galectin 8, MelanA/MART1, Ras mutant, hTERT, sarcoma translocation breakpoints, ML-IAP, ERG (TMPRSS2 ETS fusion gene), NA17, PAX3, Androgen receptor, Cyclin B1, MYCN, RhoC, TRP-2, CYP1B1, BORIS, SART3, PAX5, OY-TES1, LCK, AKAP-4, SSX2, RAGE-1, human telomerase reverse transcriptase, RU1, RU2, intestinal carboxyl esterase, mut hsp70-2, CD79a, CD79b, CD72, LAIR1, FCAR, LILRA2, CD300LF, CLEC12A, BST2, EMR2, LY75, GPC3, FCRL5, and IGLL1.
   326. The modified cell of any one of embodiments 324 and 325, wherein the intracellular signaling domain comprises a co-stimulatory signaling domain, or a primary signaling domain and a co-stimulatory signaling domain, wherein the co-stimulatory signaling domain comprises a functional signaling domain of a protein selected from the group consisting of CD27, CD28, 4-1BB (CD137), OX40, CD30, CD40, PD-1, ICOS, lymphocyte function-associated antigen-1 (LFA-1), CD2, CD7, LIGHT, NKG2C, B7-H3, a ligand that specifically binds with CD83, CDS, ICAM-1, GITR, BAFFR, HVEM (LIGHTR), SLAMF7, NKp80 (KLRF1), CD160, CD19, CD4, CD8alpha, CD8beta, IL2R beta, IL2R gamma, IL7R alpha, ITGA4, VLA1, CD49a, ITGA4, IA4, CD49D, ITGA6, VLA-6, CD49f, ITGAD, CD11d, ITGAE, CD103, ITGAL, CD11a, LFA-1, ITGAM, CD11b, ITGAX, CD11c, ITGB1, CD29, ITGB2, CD18, LFA-1, ITGB7, TNFR2, TRANCE/RANKL, DNAM1 (CD226), SLAMF4 (CD244, 2B4), CD84, CD96 (Tactile), CEACAM1, CRTAM, Ly9 (CD229), CD160 (BY55), PSGL1, CD100 (SEMA4D), CD69, SLAMF6 (NTB-A, Ly108), SLAM (SLAMF1, CD150, IPO-3), BLAME (SLAMF8), SELPLG (CD162), LTBR, LAT, GADS, SLP-76, PAG/Cbp, NKp44, NKp30, NKp46, and NKG2D.
   327. The modified cell of any one of embodiments 312-318 and 319-323, wherein the modified cell comprises the antigen binding molecule, the antigen binding molecule is a modified TCR.
   328. The modified cell of embodiment 327, wherein the TCR is derived from spontaneously occurring tumor-specific T cells in patients.
   329. The modified cell of embodiment 328, wherein the TCR binds a tumor antigen.
   330. The modified cell of embodiment 329, wherein the tumor antigen comprises CEA, gp100, MART-1, p53, MAGE-A3, or NY-ESO-1.
   331. The modified cell of embodiment 329, wherein the TCR comprises TCRγ and TCRδ Chains or TCRα and TCRβ chains, or a combination thereof.
   332. The modified cell of any of the preceding embodiments (312-331), wherein the cell is an immune effector cell (e.g., a population of immune effector cells).
   333. The modified cell of embodiment 332, wherein the immune effector cell is a T cell or an NK cell.
   334. The modified cell of embodiment 333, wherein the immune effector cell is a T cell.
   335. The modified cell of embodiment 333 wherein the T cell is a CD4+ T cell, a CD8+ T cell, or a combination thereof.
   336. The modified cell of any one of embodiments 312-336, wherein the cell is a human cell.
   337. The modified cell of any one of the preceding embodiments 312-336, wherein the enhanced expression and/or function of the one or more molecules is implemented by introducing a polynucleotide encoding the one or more molecules and/or the binding molecule, which is present in the modified cell in a recombinant DNA construct, in an mRNA, or in a viral vector.
   338. The modified cell of embodiment 337, wherein the polynucleotide is an mRNA, which is not integrated into the genome of the modified cell.
   339. The modified cell of embodiment 337, wherein the polynucleotide is associated with an oxygen-sensitive polypeptide domain.
   340. The modified cell of embodiment 339, wherein the oxygen-sensitive polypeptide domain comprises HIF VHL binding domain.
   341. The modified cell of embodiment 337, wherein the polynucleotide is regulated by a promoter comprising a binding site for a transcription modulator that modulates the expression and/or secretion of the therapeutic agent in the cell.
   342. The modified cell of embodiment 341, wherein the transcription modulator is or includes Hif1a, NFAT, FOXP3, and/or NFkB.
   343. A pharmaceutical composition comprising a population of the modified cells of any one of embodiments 311-342, wherein the cells are T cells.
   344. The pharmaceutical composition of embodiment 343, wherein the promoter is responsive to the transcription modulator.
   335. The pharmaceutical composition of embodiment 323, wherein the promoter is operably linked to the polynucleotide encoding the one or more molecules, and wherein the promoter drives expression and/or secretion of the one or more molecules in the cell.
   346. The pharmaceutical composition of embodiment 343, wherein the promoter comprises at least a sequence of SEQ ID NOs: 323, 324, or 325.
   347. The pharmaceutical composition of embodiment 343, wherein the modified T cell comprises polynucleotides encoding SEQ ID NOs: 286 and 469, and a polynucleotide encoding SEQ ID NO: 328.
   348. The pharmaceutical composition of embodiment 343, wherein the CAR and the one or more molecules are produced in the form of a polyprotein, which is cleaved to generate separate CAR and the one or more therapeutic agents, and wherein a cleavable moiety is between the CAR and the one or more therapeutic agents, the cleavable moiety comprising a 2A peptide, and the 2A peptide comprising P2A or T2A.
   349. The pharmaceutical composition of embodiment 343, wherein the modified T cell comprises an additional CAR, the CAR binds a white blood cell (e.g., CD19), and the additional CAR binds solid tumor antigen.
   350. The pharmaceutical composition of embodiment 343, wherein the modified T cell comprises an additional CAR, the CAR binds a solid tumor antigen, and the additional CAR binds an antigen of a white blood cell.
   351. The pharmaceutical composition of embodiment 349, wherein the solid tumor antigen is tMUC 1, PRLR, CLCA1, MUC12, GUCY2C, GPR35, CR1L, MUC 17, TMPRSS11B, MUC21, TMPRSS11E, CD207, SLC30A8, CFC1, SLC12A3, SSTR1, GPR27, FZD10, TSHR, SIGLEC15, SLC6A3, KISS1R, QRFPR, GPR119, CLDN6, UPK2, ADAM12, SLC45A3, ACPP, MUC21, MUC16, MS4A12, ALPP, CEA, EphA2, FAP, GPC3, IL13-Rα2, Mesothelin, PSMA, ROR1, VEGFR-II, GD2, FR-α, ErbB2, EpCAM, EGFRvIII, PSCA, or EGFR, and wherein the antigen of the white blood cell is CD19, CD20, CD22, or BCMA.
   352. The pharmaceutical composition of embodiment 349, wherein the modified T cell comprises a dominant negative form of PD-1.
   353. The modified cell of any one of embodiments 311-352, wherein the modified cell is capable of reducing M2 macrophages and/or converting M2 macrophages to M1 macrophages.
   354. A modified cell comprising an antigen binding molecule, wherein expression and/or function of one or more molecules in the modified cell has been increased or enhanced, the one or more molecules comprising a cytokine.
   355. A modified cell comprising an antigen binding molecule, wherein expression and/or function of one or more molecules in the modified cell has been increased or enhanced, the one or more molecules comprising at least one of IL-6, IL-12, IL-7, IL-15, and IFNγ.
   356. A modified cell comprising an antigen binding molecule, wherein expression and/or function of one or more molecules in the modified cell has been increased or enhanced, the one or more molecules comprising IL-6 and IFNγ.
   357. A modified cell comprising an antigen binding molecule, wherein expression and/or function of one or more molecules in the modified cell has been increased or enhanced, the one or more molecules comprising IL-12.
   358. A plurality of modified cells comprising an antigen binding molecule, wherein expression and/or function of one or more molecules in the plurality of modified cells modified cell has been increased or enhanced, the one or more molecules comprising at least one of IL-6, IL-12, and IFNγ.
   359. The plurality of modified cells of embodiment 358, wherein the plurality of modified cells comprise the modified cell of embodiment 357 and the modified cell of embodiment 358.
   360. A pharmaceutical composition comprising the population of the modified cell(s) of any one of embodiments 354-359.
   361. A method of enhancing, causing or eliciting T cell response in a subject in need thereof, enhancing T cell expansion, enhancing treatment or inhibition of tumor growth, and/or treating a tumor of the subject, the method comprising administering an effective amount of the composition of embodiment 360 to the subject, the expansion of the modified cells(s), T cell response caused by the modified cell(s), or inhibition of tumor growth enhanced as compared to the modified cell of which expression and/or function of the one or more molecules has not been enhanced.
   362. The modified cell of any preceding embodiments 354-361, wherein the one or more molecules comprise a derivative of the one or more molecules.
   363. The modified cell of any one of embodiments 354-362, wherein the modified cell comprises a polynucleotide encoding one or more components of a gene editing system associated with the one or more genes.
   364. The modified cell of any one of embodiments 354-362, wherein the enhanced expression and/or function of the one or more genes is implemented by introducing a polynucleotide of the one or more genes encoding the one or more molecules, which is present in the modified cell in a recombinant DNA construct, in an mRNA, or in a viral vector.
   365. The modified cell of embodiments 363 or 364, wherein the polynucleotide is an mRNA, which is not integrated into the genome of the modified cell.
   366. The modified cell of any one of embodiments 354-362, wherein the modified cell comprises one or more polynucleotides encoding the one or more molecules, and the one or more polynucleotides are associated with an oxygen-sensitive polypeptide domain.
   367. The modified cell of embodiment 366, wherein the oxygen-sensitive polypeptide domain comprises a HIF VHL binding domain.
   368. The modified cell of embodiments 366 or 367, wherein the one or more polynucleotides are regulated by a promoter comprising a binding site for a transcription modulator that modulates the expression and/or secretion of the therapeutic agent in the cell.
   369. The modified cell of embodiment 368, wherein the transcription modulator is or includes Hif1a, NFAT, FOXP3, and/or NFkB.
   370. The modified cell of any one of embodiments 356-361, wherein the modified cell comprises a nucleotide sequence encoding a nuclear factor of activated T-cells (NFAT) promoter operatively associated with a polynucleotide encoding IL-6 and IFNγ.
   371. The modified cell of any one of embodiments 356-361, wherein the modified cell comprises a nucleotide sequence encoding a nuclear factor of activated T-cells (NFAT) promoter operatively associated with a polynucleotide encoding IL-6, 2A peptide, and IFNγ.
   372. The modified cell of any one of embodiments 356-361, 370, and 371, wherein the modified cell comprises a nucleotide sequence encoding a nuclear factor of activated T-cells (NFAT) promoter operatively associated with a polynucleotide encoding IL-12 associated with a HIF VHL binding domain.
   373. The modified cell of any one of embodiments 356-361, 370, and 371, wherein the modified cell comprises a nucleotide sequence encoding a nuclear factor of activated T-cells (NFAT) promoter operatively associated with a polynucleotide encoding IL-12.
   374. The modified cell of any one of embodiments 370-373, wherein the NFAT promoter is located 3′ of the nucleotide sequence encoding the one or more molecules.
   375. The modified cell of any one of embodiments 354-374, wherein the one or more molecules are one or more human cytokines.
   376. The modified cell of any one of embodiments 354-375, wherein the modified cell comprises a sequence of at least one of SEQ ID Nos: 328 or 456.
   377. The modified cell of any one of embodiments 354-375, wherein the modified cell comprises a sequence of at least one of SEQ ID NOs: 511-525.
   378. The modified cell of any one of embodiments 354-375, wherein the modified cell comprises a sequence of at least one of SEQ ID NOs: 328, 456, 470, 471, 474, 475, 478-480, 482, 483, 488, 489, 483, 494, or 511-525.
   379. The modified cell of any one of embodiments 354-375, wherein the modified cell comprises a sequence of at least one of SEQ ID NOs: 278, 327, or 328 in the order of N-terminus to C-terminus.
   380. The modified cell of any one of embodiments 354-375, wherein the modified cell comprises a sequence of at least one of SEQ ID NOs: 478 or 479.
   381. The modified cell of any one of embodiments 354-375, wherein the modified cell comprises a sequence of at least one of SEQ ID NOs:450, 470-473, 480, 481, 486, or 487.
   382. The modified cell of any one of embodiments 354-375, wherein the modified cell comprises a sequence of at least one of SEQ ID NOs: 328, 287, or 450.
   383. The plurality of modified cells of embodiment 358, wherein the plurality of modified cells comprises at least one of the modified cells of embodiments 370-383.
   384. A polynucleotide comprising the nucleotide sequence(s) of any one of embodiments 363-383 and/or a nucleotide sequence encoding the binding molecule.
   385. The modified cell of any one of embodiments 354-374, wherein the modified cell comprises an addition of exogenous gene that are associated with a biosynthesis or transportation pathway of the one or more molecules.
   386. The modified cell of any one of embodiments 354-385, wherein the antigen binding molecule is chimeric antigen receptor (CAR), which comprises an antigen-binding domain, a transmembrane domain, and an intracellular signaling domain.
   387. The modified cell of embodiment 386, wherein the antigen-binding domain binds a tumor antigen selected from the group consisting of TSHR, CD19, CD123, CD22, CD30, CD171, CS-1, CLL-1, CD33, EGFRvIII, GD2, GD3, BCMA, Tn Ag, PSMA, ROR1, FLT3, FAP, TAG72, CD38, CD44v6, CEA, EPCAM, B7H3, KIT, IL-13Rα2, Mesothelin, IL-11Ra, PSCA, PRSS21, VEGFR2, LewisY, CD24, PDGFR-beta, SSEA-4, CD20, Folate receptor alpha, ERBB2 (Her2/neu), MUC1, EGFR, NCAM, Prostase, PAP, ELF2M, Ephrin B2, IGF-I receptor, CAIX, LMP2, gp100, bcr-abl, tyrosinase, EphA2, Fucosyl GM1, sLe, GM3, TGS5, HMWMAA, o-acetyl-GD2, Folate receptor beta, TEM1/CD248, TEM7R, CLDN6, GPRC5D, CXORF61, CD97, CD179a, ALK, Polysialic acid, PLAC1, GloboH, NY-BR-1, UPK2, HAVCR1, ADRB3, PANX3, GPR20, LY6K, OR51E2, TARP, WT1, NY-ESO-1, LAGE-1a, MAGE-A1, legumain, HPV E6, E7, MAGE A1, ETV6-AML, sperm protein 17, XAGE1, Tie 2, MAD-CT-1, MAD-CT-2, Fos-related antigen 1, p53, p53 mutant, prostein, survivin and telomerase, PCTA-1/Galectin 8, MelanA/MART1, Ras mutant, hTERT, sarcoma translocation breakpoints, ML-IAP, ERG (TMPRSS2 ETS fusion gene), NA17, PAX3, Androgen receptor, Cyclin B1, MYCN, RhoC, TRP-2, CYP1B1, BORIS, SART3, PAX5, OY-TES1, LCK, AKAP-4, SSX2, RAGE-1, human telomerase reverse transcriptase, RU1, RU2, intestinal carboxyl esterase, mut hsp70-2, CD79a, CD79b, CD72, LAIR1, FCAR, LILRA2, CD300LF, CLEC12A, BST2, EMR2, LY75, GPC3, FCRL5, and IGLL1.
   388. The modified cell of any one of embodiments 386 and 387, wherein the intracellular signaling domain comprises a co-stimulatory signaling domain, or a primary signaling domain and a co-stimulatory signaling domain, wherein the co-stimulatory signaling domain comprises a functional signaling domain of a protein selected from the group consisting of CD27, CD28, 4-1BB (CD137), OX40, CD30, CD40, PD-1, ICOS, lymphocyte function-associated antigen-1 (LFA-1), CD2, CD7, LIGHT, NKG2C, B7-H3, a ligand that specifically binds with CD83, CDS, ICAM-1, GITR, BAFFR, HVEM (LIGHTR), SLAMF7, NKp80 (KLRF1), CD160, CD19, CD4, CD8alpha, CD8beta, IL2R beta, IL2R gamma, IL7R alpha, ITGA4, VLA1, CD49a, ITGA4, IA4, CD49D, ITGA6, VLA-6, CD49f, ITGAD, CD11d, ITGAE, CD103, ITGAL, CD11a, LFA-1, ITGAM, CD11b, ITGAX, CD11c, ITGB1, CD29, ITGB2, CD18, LFA-1, ITGB7, TNFR2, TRANCE/RANKL, DNAM1 (CD226), SLAMF4 (CD244, 2B4), CD84, CD96 (Tactile), CEACAM1, CRTAM, Ly9 (CD229), CD160 (BY55), PSGL1, CD100 (SEMA4D), CD69, SLAMF6 (NTB-A, Ly108), SLAM (SLAMF1, CD150, IPO-3), BLAME (SLAMF8), SELPLG (CD162), LTBR, LAT, GADS, SLP-76, PAG/Cbp, NKp44, NKp30, NKp46, and NKG2D.
   389. The modified cell of any one of embodiments 354-384, wherein the antigen binding molecule is a modified TCR.
   390. The modified cell of embodiment 389, wherein the TCR is derived from spontaneously occurring tumor-specific T cells in patients.
   391. The modified cell of embodiment 390 wherein the TCR binds a tumor antigen.
   392. The modified cell of embodiment 391, wherein the tumor antigen comprises CEA, gp100, MART-1, p53, MAGE-A3, or NY-ESO-1.
   393. The modified cell of embodiment 391, wherein the TCR comprises TCRγ and TCRδ chains or TCRα and TCRβ chains, or a combination thereof.
   394. A modified cell comprising an antigen binding molecule, wherein expression and/or function of IL-12 in the modified cell has been increased or enhanced.
   395. A modified cell comprising an antigen binding molecule, wherein expression and/or function of IL-6 in the modified cell has been increased or enhanced.
   396. A modified cell comprising an antigen binding molecule, wherein expression and/or function of IL-6 and IFNγ in the modified cell has been increased or enhanced.
   397. A modified cell comprising an antigen binding molecule, wherein expression and/or function of IFNγ in the modified cell has been increased or enhanced.
   398. A plurality of modified cells comprising the modified cells of embodiments 394 and 396.
   399. A plurality of modified cells comprising at least one of the modified cells of embodiments 394, 395, 396, or 397.
   400. The plurality of modified cells of embodiments 398 or 399, wherein the antigen binding molecule is a CAR binding to an antigen of WBC (e.g., CD19).
   401. The plurality of modified cells of any one of embodiments 398 and 399, wherein the antigen binding molecule is a CAR binding to a solid tumor antigen (e.g., tMUC1).
   402. The plurality of modified cells of any one of embodiments 398 and 399, wherein the plurality of modified cells comprise a first modified cell comprising a polynucleotide encoding IL-12 and/or a second modified cell comprising a polynucleotide encoding IL-6 and IFNγ, the antigen binding molecule is a CAR binding to an antigen of WBC (e.g., CD19), and the expression of IL-12, IL-6, and IFNγ is regulated by NFAT promoter.
   403. The modified cell of any preceding embodiments 394-401, wherein the modified cell comprises a polynucleotide encoding IL-12, IL-6 and IFNγ, IL-16, or IFNγ.
   404. The modified cell of embodiment 403, wherein the polynucleotide is operatively linked to a polynucleotide encoding NFAT.
   405. The modified cell of embodiment 404, wherein expression of IL-12, IL-6 and IFNγ, IL-16, or IFNγ is enhanced in the modified cell when the modified cell is activated.
   406. The modified cell of embodiment 404, wherein the polynucleotide encoding IL-12 is associated with a HIF VHL binding domain such that maintenance and/or function of the expressed IL-12 is oxygen-sensitive.
   407. The plurality of modified cells of embodiment 400, wherein the plurality of modified cells further comprise an additional modified cell comprising an additional binding molecule (e.g., CAR or TCR) binding a solid tumor antigen.
   408. The plurality of modified cells of embodiment 407, wherein the additional modified cell is an additional CAR binding a solid tumor antigen.
   409. The modified cell of any one of embodiments 394-408, wherein the modified cell is a human T cell derived form a subject or a healthy donor.
   410. The modified cell of any one of embodiments 394-409, wherein the cell is an immune effector cell.
   411. The modified cell of embodiment 410, wherein the immune effector cell is a T cell or an NK cell.
   412. The modified cell of embodiment 411, wherein the immune effector cell is a T cell.
   413. The modified cell of embodiment 412, wherein the T cell is a CD4+ T cell, a CD8+ T cell, or a combination thereof.
   414. The modified cell of any one of embodiments 354-412, wherein the cell is a human cell.
   415. The modified cell of any one of embodiments 354-412, wherein the modified cell comprises more than one binding molecule.
   416. A plurality of modified cells of any one of embodiments 354-415, wherein the plurality of modified cells comprise a modified cell comprises a CAR binding an antigen of WBC (e.g., CD19) and a CAR binding a solid tumor antigen (e.g., tMUC1).
   417. The modified cell of any one of embodiments 354-416, wherein the modified cell comprises a dominant negative form of PD1.
   418. A polynucleotide comprising a polynucleotide encoding a promoter operatively linked to a polynucleotide encoding a therapeutic agent and a polynucleotide encoding a CAR binding a cell surface molecule of WBC. An example of the polynucleotide is provided in FIG. 56.
   419. The polynucleotide of embodiment 418, wherein the promoter comprises at least one of Hif1a, NFAT, FOXP3, NFKB, AP-1, AT-hook, and/or NFkB.
   420. The polynucleotide of embodiment 418, wherein the promoter is NFAT such that a cell comprising the polynucleotide express the therapeutic agent in response to activation of the cell.
   421. The polynucleotide of any one of embodiments 418-420, wherein the cell surface molecule is CD19, CD22, CD20, BCMA, CD5, CD7, CD2, CD16, CD56, CD30, CD14, CD68, CD11b, CD18, CD169, CD1c, CD33, CD38, CD138, or CD13.
   422. The polynucleotide of any one of embodiments 418-420, wherein the cell surface molecule is CD19, CD20, CD22, or BCMA.
   423. The polynucleotide of any one of embodiments 418-420, wherein the cell surface molecule is CD19 or BCMA.
   424. The polynucleotide any one of embodiments 418-423, wherein the therapeutic agent comprises a cytokine.
   425. The polynucleotide of any one of embodiments 418-423, wherein the therapeutic agent comprises at least one of IFN-γ, IL-2, IL-6, IL-7, IL-15, IL-17, or IL-23.
   426. The polynucleotide of any one of embodiments 418-423, wherein the therapeutic agent comprises IL-12.
   427. The polynucleotide of any one of embodiments 418-423, wherein the therapeutic agent comprises IL-6, IFNγ, or a combination thereof.
   428. The polynucleotide of any one of embodiments 418-427, wherein the polynucleotide encoding the therapeutic agent further encodes a HIF VHL binding domain linked to the therapeutic agent such that expression of the therapeutic agent by a cell comprising the polynucleotide is regulated by a level of oxygen.
   429. A composition comprising a plurality of polynucleotides comprising the polynucleotide of any one of embodiments 418-428 and an additional polynucleotide encoding a CAR binding a solid tumor antigen.
   430. A composition comprising a plurality of polynucleotides comprising two polynucleotides of any one of embodiments 418-428 and an additional polynucleotide encoding a CAR binding a solid tumor antigen, wherein the therapeutic agents of two polynucleotides are different.
   431. The composition of any one of embodiments 429 and 430, wherein the additional polynucleotide encoding a CAR binding a solid tumor antigen further comprises a polynucleotide encoding a molecule or the therapeutic agent of any one of embodiments 418-428.
   432. The composition of embodiment 431, wherein the molecule is a modified checkpoint protein (e.g., dominant negative forms of PD1 or PDL-1).
   433. A modified cell comprising the polynucleotide of any one of embodiments 418-428 and/or the composition of any one of embodiments 429-432.
   434. A method of causing, inducing, or enhancing T cell response of a subject having a tumor or treating the subject, the method comprising administering an effective amount of a pharmaceutical composition comprising the modified cells of embodiment 433.
   434. The method of embodiment of 434, wherein the tumor is a solid tumor.
   435. A modified cell comprising the polynucleotide of any one of embodiments 418-428.
   436. A method of causing, inducing, or enhancing T cell response of a subject having leukemia, lymphoma, or multiple myeloma or treating the subject, the method comprising administering an effective amount of a pharmaceutical composition comprising modified cells of embodiment 435.
   437. The method of embodiment 436, wherein the CAR binds CD19, the subject has leukemia or lymphoma, and the therapeutic agent comprises IL-6 and IFNγ.
   438. The method of embodiment 437, wherein the modified cell further comprises a polynucleotide encoding IL-12.
   439. The method of embodiment 436, wherein the CAR binds BCMA, the subject has myeloma, and the therapeutic agent comprises IL-6 and IFNγ.
   440. The method of embodiment 439, wherein the modified cell further comprises a polynucleotide encoding IL-12.
   441. A method for treating a subject having cancer, the method comprising:
   contacting T cells with a plurality of polynucleotides comprising a first polynucleotide encoding a CAR binding a B cell antigen and one or more cytokines and a second polynucleotide encoding a CAR binding a solid tumor antigen to obtain modified T cells;
   administering an effective amount of the modified T cells to the subject.
   442. A method for enhancing treatment of a subject having cancer, the method comprising: contacting T cells with a plurality of polynucleotides comprising a first polynucleotide encoding a CAR binding a B cell antigen and one or more cytokines and a second polynucleotide encoding a CAR binding a solid tumor antigen to obtain modified T cells;
   administering an effective amount of the modified cells to the subject, wherein the modified T cells enhance T cell response to the CAR T cell infusion, the T cell response comprising at least one of T cell expansion, T cell activation, cytokine releases, and inhibition on tumor growth in the subject as compared to a subject administered with modified T cells comprising the CAR binding the solid tumor antigen or administered with modified T cells comprising the CAR binding the B cell antigen, or a combination thereof.
   443. The method of embodiment 441 or 442, further comprising culturing the modified T cells; and
   444. The method of embodiment 441 or 442, wherein the one or more cytokines comprise IL-6 and/or IFNγ.
   445. The method of embodiment 441 or 442, wherein expression and/or function of one or more proteins in at least one portion of the modified T cell has been increased or enhanced, and the one or more proteins comprise IL-6 or its derivatives, IFNγ or its derivatives, or a combination thereof.
   446. The method of embodiment 444, wherein at least one portion of the modified T cells express or secrete the one or more proteins in response to activation of at least one portion of the modified T cells or hypoxia, or a combination thereof.
   447. The method of embodiment 444, wherein IL-6 is human IL-6, and IFNγ is human IFNγ.
   448. The method of embodiment 444, wherein the modified T cells comprise an exogenous polynucleotide encoding the one or more proteins.
   449. The method of embodiment 448, wherein the exogenous polynucleotide is present in the modified T cell in a recombinant DNA construct, in an mRNA, or in a viral vector.
   450. The method of embodiment 448, wherein the exogenous polynucleotide comprises a polynucleotide encoding SEQ ID NOs: 287 and a polynucleotide encoding SEQ ID NO: 328.
   451. The method of embodiment 448, wherein the exogenous polynucleotide comprises a promoter comprising a binding site for a transcription modulator that modulates the expression and/or secretion of the one or more proteins in the modified cell.
   452. The method of embodiment 451, wherein the transcription modulator is or comprises Hif1a, NFAT, FOXP3, or NFkB.
   453. The method of embodiment 444, wherein the antigen binding molecule and the one or more proteins are produced in the form of a polyprotein, which is cleaved to generate separate antigen binding molecule and the one or more therapeutic agent molecules, and wherein a cleavable moiety is between the antigen binding molecule and the one or more proteins.
   454. The method of embodiment 444, wherein the plurality of polynucleotides comprising a third polynucleotide encoding a CAR binding a B cell antigen and IL-12 or its derivatives.
   455. The method of embodiment 454, wherein the modified T cells express and secrete human IL-12 in response to activation of the modified T cells or hypoxia, or a combination thereof.
   456. The method of any of embodiments 441-455, wherein the CAR comprises an extracellular domain, a transmembrane domain, and an intracellular domain, the extracellular domain binding an antigen.
   457. The method of embodiment 456, wherein the CAR binds TSHR, CD19, CD123, CD22, CD30, CD171, CS-1, CLL-1, CD33, EGFRvIII, GD2, GD3, BCMA, Tn Ag, PSMA, ROR1, FLT3, FAP, TAG72, CD38, CD44v6, CEA, EPCAM, B7H3, KIT, IL-13Rα2, Mesothelin, IL-11Ra, PSCA, PRSS21, VEGFR2, LewisY, CD24, PDGFR-beta, SSEA-4, CD20, Folate receptor alpha, ERBB2 (Her2/neu), MUC1, EGFR, NCAM, Prostase, PAP, ELF2M, Ephrin B2, IGF-I receptor, CAIX, LMP2, gp100, bcr-abl, tyrosinase, EphA2, Fucosyl GM1, sLe, GM3, TGS5, HMWMAA, o-acetyl-GD2, Folate receptor beta, TEM1/CD248, TEM7R, CLDN6, GPRC5D, CXORF61, CD97, CD179a, ALK, Polysialic acid, PLAC1, GloboH, NY-BR-1, UPK2, HAVCR1, ADRB3, PANX3, GPR20, LY6K, OR51E2, TARP, WT1, NY-ESO-1, LAGE-1a, MAGE-A1, legumain, HPV E6, E7, MAGE A1, ETV6-AML, sperm protein 17, XAGE1, Tie 2, MAD-CT-1, MAD-CT-2, Fos-related antigen 1, p53, p53 mutant, prostein, survivin and telomerase, PCTA-1/Galectin 8, MelanA/MART1, Ras mutant, hTERT, sarcoma translocation breakpoints, ML-IAP, ERG (TMPRSS2 ETS fusion gene), NA17, PAX3, Androgen receptor, Cyclin B1, MYCN, RhoC, TRP-2, CYP1B1, BORIS, SART3, PAX5, OY-TES1, LCK, AKAP-4, SSX2, RAGE-1, human telomerase reverse transcriptase, RU1, RU2, intestinal carboxyl esterase, mut hsp70-2, CD79a, CD79b, CD72, LAIR1, FCAR, LILRA2, CD300LF, CLEC12A, BST2, EMR2, LY75, GPC3, FCRL5, and IGLL1.
   458. The method of embodiment 457, wherein the intracellular domain comprises a co-stimulatory domain that comprises an intracellular domain of a co-stimulatory molecule selected from the group consisting of CD27, CD28, 4-1BB (CD137), OX40, CD30, CD40, PD-1, ICOS, lymphocyte function-associated antigen-1 (LFA-1), CD2, CD7, LIGHT, NKG2C, B7-H3, a ligand that specifically binds with CD83, CDS, ICAM-1, GITR, BAFFR, HVEM (LIGHTR), SLAMF7, NKp80 (KLRF1), CD160, CD19, CD4, CD8alpha, CD8beta, IL2R beta, IL2R gamma, IL7R alpha, ITGA4, VLA1, CD49a, ITGA4, IA4, CD49D, ITGA6, VLA-6, CD49f, ITGAD, CD11d, ITGAE, CD103, ITGAL, CD11a, LFA-1, ITGAM, CD11b, ITGAX, CD11c, ITGB1, CD29, ITGB2, CD18, LFA-1, ITGB7, TNFR2, TRANCE/RANKL, DNAM1 (CD226), SLAMF4 (CD244, 2B4), CD84, CD96 (Tactile), CEACAM1, CRTAM, Ly9 (CD229), CD160 (BY55), PSGL1, CD100 (SEMA4D), CD69, SLAMF6 (NTB-A, Ly108), SLAM (SLAMF1, CD150, IPO-3), BLAME (SLAMF8), SELPLG (CD162), LTBR, LAT, GADS, SLP-76, PAG/Cbp, NKp44, NKp30, NKp46, and NKG2D.
   459. The method of embodiment 456, wherein the CAR binds the B cell antigen selected from the group consisting of CD19, CD22, CD20, BCMA, CD5, CD7, CD2, CD16, CD56, CD30, CD14, CD68, CD11b, CD18, CD169, CD1c, CD33, CD38, CD138, and CD13.
   460. The method of any of embodiments 441-459, wherein the cancer is thyroid cancer, the B cell antigen is CD19, and the solid tumor antigen is TSHR.
   461. The method of any of embodiments 441-459, wherein the cancer is colorectal cancer, the B cell antigen is CD19, and the solid tumor antigen is GUCY2C.
   462. A pharmaceutical composition comprising a first population of CAR T cells binding TSHR or GUCY2C, a second population of CAR T cells binding CD19, wherein expression of one or more cytokines of the second population of CAR cells has been enhanced, the one or more cytokines comprising at least one of IL-6, IL-12, and IFNγ.
   463. The pharmaceutical composition of embodiment 462, wherein the pharmaceutical composition further comprises a third population of CAR T cells binding CD10 and TSHR or GUCY2C.
   464. A pharmaceutical composition comprising the modified cells of any of embodiments 441-461.
   465. A method of enhancing cytokine release, the method comprising:
   introducing a polynucleotide encoding one or more cytokines into cells to obtain modified cells or introducing a molecule that enhances expression and/or functions of the one or more cytokines into cells to obtain modified cells; contacting the modified cells with cells comprising an antigen (e.g., solid tumor antigen); and
   measuring a level of the cytokine release by the modified cells, wherein the level of the cytokine released in response to the cells expressing the antigen is higher than the level of the cytokine released by cells that were not introduced with the polynucleotide or the molecule and contacted with cells expressing the antigen.
   466. The method of embodiment 465, wherein the one or more cytokines comprise IL-6 and/or IFNγ, the modified cells overexpress IL-6 and/or IFNγ in response to the cells expressing the antigen, and the level of the cytokine released by the modified cells in response to the cells is higher than the level of the cytokine released by cells that don't overexpress IL-6 and/or IFNγ.
   467. The method of embodiment 466, wherein the modified cells further overexpress IL-12, the level of the cytokine released by the modified cells in response to the cells expressing the antigen is higher than the level of the cytokine released by cells that overexpress IL-6 and/or IFNγ but not IL-12.
   468. The method of embodiment 467, wherein the cytokine release comprises a cytokine release of at least one of IL6, IFNγ, TNF-α, GZMB.
   468. A method of enhancing T cell response, the method comprising: introducing a polynucleotide encoding IFNγ into T cells; culturing the T cells; contacting the T cells with a cell expressing an antigen; and measuring a level of T cell response of the T cells in response to the cell expressing the antigen, wherein the level of T cell response of the T cells is higher than the level of T cell response of T cells without the polynucleotide encoding IFNγ.
   469. The method of embodiment 468, further comprising: introducing a polynucleotide encoding IL-6 into T cells, wherein the level of T cell response of the T cells is higher than the level of T cell response of T cells without the polynucleotide encoding IL-6 but having the polynucleotide encoding IFNγ.
   470. The method of embodiment 468 or 469, wherein the T cell response comprises a cytokine release, which includes the release of at least one of IL-2, IL-6, TNFα, or IFNγ.
   471. A method of enhancing T cell response, the method comprising: introducing a polynucleotide encoding IL-6 into T cells; culturing the T cells; contacting the T cells with a cell expressing an antigen; and measuring a level of T cell response of the T cells in response to the cell expressing the antigen, wherein the level of T cell response of the T cells is higher than the level of T cell response of T cells without the polynucleotide encoding IL-6.
   472. The method of embodiment 471, further comprising: introducing a polynucleotide encoding IL-12 into T cells, wherein the level of T cell response of the T cells is higher than the level of T cell response of T cells without the polynucleotide encoding IL-12 but having the polynucleotide encoding IL-6.
   473. The method of any embodiments 471 or 472, wherein the T cell response comprises a cytokine release, which includes at least one of IL-12, TNFα, and IFNγ.
   474. The method of any one of embodiments 465-473, wherein the modified cells or T cells comprise the binding molecule of any one of embodiments 465-473.
   475. The method of any of embodiments 465-473, wherein the antigen is the solid tumor antigen or the WBC antigen.
   476. The method of any one of embodiments 465-468, 474, or 475, wherein the cells are T cells, NK cells, DCs, and/or macrophages.
   477. The method of any one of embodiments 465-475, wherein the cells or the T cells are human cells.
   478. The method of any one of embodiments 465-468, 474, or 475, wherein the cells are human T cells.
   479. A composition comprising one or more vectors described in Embodiment 1 and Embodiment 2 of FIG. 56 and/or in Table 11. In embodiments, the one or more vectors are Vector 1, Vector 2, Vector 3, or Vector 4 of Table 11.
   480. A method of preparing CAR T cells, the method comprising: obtaining T cells from healthy donor or a subject; contacting the T cells with the composition of embodiment 479 to obtain the CAR T cells; culturing the CAR T cells.
   481. The method of embodiment 480, further comprising: determining a multiplicity of infection value associated with the contacting such that a number of T cells expressing a single type of CAR molecule (e.g., CD19 CAR or TSHR CAR) is 1.1, 1.2, 1.3, 1.4, 1.5, 1.6 1.7, 1.8, 1.9, 2, 2.5, 3, 3.5, 4, 4.5, 5, 6, 7, 8, 9, 10, 15, 20, 30, 40, or 50 or more times (e.g., 100, 500, 1000 times) than T cells expressing more than one type of CARs (e.g., both CD19 CAR and TSHR CAR).
   482. The method of embodiment 480 or 481, wherein a number of T cells expressing a single type of CAR molecule (e.g., CD19 CAR or TSHR CAR) is at least 2, 5, 10, or 20 times than T cells expressing more than one type of CARs (e.g., both CD19 CAR and TSHR CAR).
   482. The method of embodiment 480, wherein a number of T cells expressing a single type CAR molecule (e.g., CD19 CAR or TSHR CAR) is 1.1, 1.2, 1.3, 1.4, 1.5, 1.6 1.7, 1.8, 1.9, 2, 2.5, 3, 3.5, 4, 4.5, 5, 6, 7, 8, 9, 10, 15, 20, 30, 40, or 50 or more times (e.g., 100, 500, 1000 times) than T cells expressing more than one type of CARs (e.g., both CD19 CAR and TSHR CAR).
   483. A method of treating a subject having cancer, the method comprising: administering an effective amount of a pharmaceutical composition comprising CAR T cells prepared using the method of any one of embodiments 480-482 to the subject.
   484. A method of using the polynucleotide, modified cell, population of cells, fusion protein, composition, or methods of any one of embodiments 1 to 483 to treat a subject in need thereof.
   485. The method of embodiment 484, wherein the subject has cancer.

### EXAMPLES

### Cells Expressing Chimeric Receptors Establish Antitumor Effects in Patients with Relapsed/Refractory (R/R) Acute Lymphocytic Leukemia (ALL)

[0331] This clinical trial was designed to assess the safety and efficacy of infusing autologous T cells modified to express CD19 specific CAR/4-1BB/CD3-ζ into patients with R/R ALL. The inclusion criteria were as follows: 1) age not more than 60 years; 2) relapsed or refractory CD19+ ALL; 3) relapsed allo-HSCT without evidence of graft versus host disease (GVHD) and not requiring immunosuppression therapy, and 4) measurable disease and adequate performance status and organ function. Patients with central nervous system leukemia (CNSL) were ineligible. The protocol was approved by the Institutional Review Board. All patients provided written informed consent.

[0332] The single-chain fragment variable (scFv) sequence-specific for CD19 was derived from Clone FMC63 (See Zola H. et al., Immunol Cell Biol 1991; 69:411-22). The 4-1BB co-stimulatory domain, CD3ζ signaling domain, and the hinge and transmembrane domains were generated. CART19-4-1BB vectors harboring anti-CD19 scFv (SEQ ID: 6) and the human 4-1BB and CD3ζ signaling domains were cloned into a lentiviral backbone as previously described (See Hu Y. Journal of Hematology & Oncology 2016; 9:70).

[0333] Lentivirus was produced by transfecting 293T cells with CART19-4-1BB vectors and viral packaging plasmids which were frozen in −80° C. and thawed immediately before transduction. The lentiviral supernatant was harvested. CD3+ T cells were isolated and activated as described (See Kalos M. et al., Sci Transl Med 2011; 3:95ra73). The cells were then cultured in X-VIVO 15 medium (Lonza) containing 100 U/ml interleukin-2 (IL-2) and transduced with lentiviral supernatant at high multiplicity of infection (MOI) from 5:1 to 10:1 within 24-48 hours. The CAR transduced T cells (CD19CAR T cell) were obtained and cultured for 11 days. Three days before administration, fresh culture media were replaced. After that, no manipulation was conducted on the cells until transportation for infusion. The transduction efficiency was evaluated by flow cytometry (FACS) on day 5-7 after lentivirus transduction. The following anti-human antibodies were used: anti-hCD45 APC (BD Bioscience), anti-hCD3 FITC (BD Bioscience), biotin-labeled goat-anti-mouse IgG specific for F(ab′)2 fragment (Jackson immuno-Research, Cat #115-065-072) and PE streptavidin (BD Bioscience). Data acquisition were performed using a CytoFLEX flow cytometer (Beckman).

[0334] Prior to CD19CAR T infusion, flow cytometry (FACS) analysis of transduction efficiency and in vitro cytotoxicity assays of CD19 CAR T were performed for each patient as described herein. Additionally, CD19CAR T cultures were checked twice for possible contaminations by fungus, bacteria, mycoplasma, chlamydia, and endotoxin. PBMCs were obtained from patients by leukapheresis for CD19CAR T preparation on day 8, and the first day of CD19CAR T cell infusion was set as study day 0. Patients were given a conditioning treatment for lymphodepletion. Fludarabine- and cyclophosphamide-based conditioning treatment varied according to the tumor burden in the bone marrow (BM) and peripheral blood (PB). CD19CAR T cells were transfused directly to patients in escalating doses over a period of 3 consecutive days without any premedication. Each day CD19CAR T cells were transported to a hospital, washed, counted, checked for viability and then prepared for administration to patients, who were then observed closely for at least 2 hours. CRS was graded according to a revised grading system (See Lee D W. et al., Blood 2014; 124:188-95). Other toxicities during and after therapy were assessed according to the National Institutes of Health Common Terminology Criteria for Adverse Events Version 4.0 (http://ctep.cancer.gov/). Therapy responses were assessed by flow cytometry and morphological analysis. When possible, patients were assessed for chimeric gene expression levels. The response type was defined as minimal residual disease (MRD) negative, complete response, complete response with incomplete count recovery, stable disease, and progressive disease.

[0335] Serial BM and PB samples after CD19CAR T cell infusion were collected in K2EDTA BD vacutainer tubes (BD). The persistence of CD19CAR T cells from fresh PB and BM in patients was determined by FACS. Circulating CD19CAR T cell numbers per μl were calculated on the basis of measured absolute CD3+ T lymphocyte counts. Simultaneously, CAR DNA copies were evaluated as another method of determining CD19CAR T cell expansion and persistence. Genomic DNA was extracted using a QIAamp DNA Blood Mini Kit (Qiagen) from cryopreserved PB and BM. CD19CAR DNA copies were assessed by quantitative real-time PCR as described in the supplementary materials.

[0336] The levels of cytokines, such as IFN-γ, TNF-α, IL-4, IL-6, IL-10, IL-17, etc., in serum and cerebral spinal fluid (CSF) were measured in a multiplex format according to the manufacturer's instructions. Comparisons of continuous variables and risk factors that may influence variations in grade 3 or 4 CRS development were compared using the Mann-Whitney U test for 2 groups. Fisher's exact test was used to evaluate the influence of categorical variables on grade 3 CRS between 2 groups. Correlations were calculated using a rank-based Spearman test. Overall survival (OS) and leukemia-free survival (LFS) probabilities were determined by the Kaplan-Meier method using all enrolled patients to determine OS and those with MRD-negative responses for LFS. All quoted P values are two-sided, and P values less than 0.05 were considered statistically significant.

[0337] CD19+-RFP and Red Fluorescent Protein (RFP) were lentivirally transduced into K562 cells to produce CD19-RFP-K562 cells and K562-RFP cells, respectively. The cytotoxic activity of the CD19CAR T cells was measured before infusion by co-culture with the target cells, CD19-RFP-K562 cells or K562-RFP cells, at varying ratios of effector cell to a target cell (E:T). The target cells were plated into 96-well microwell plates (Nunc) at 10⁴ cells per well in 50 μl of RPMI 1640 media supplemented with 10% FBS (Gibco). The CD3/CD28 beads were removed, and effector T cells were mixed with target cells in the wells at the indicated E:T ratio. The total volume was 200 μl per well. After 24 hours of incubation, the cells were pipetted up and down in the 96-well microwell plates with a multi-channel pipettor to dissociate the cells into single-cell suspensions. The surviving RFP target cells in each well were photographed, and the number of surviving RFP target cells was counted and compared with those in the wells without effector cells. The cell death rate was calculated as (control-sample)/control×100%. Supernatants were also collected and quantified using the human IFN-γ Valukine ELISA Kit (R&D Systems).

[0338] Genomic DNA was extracted from cryopreserved peripheral blood and bone marrow using a QIAamp DNA Blood Mini Kit (Qiagen). Quantitative real-time PCR was performed in triplicate using the ABI 2×TaqMan Universal Master Mix with AmpErase UNG (Applied Biosystems) in a 7500 real-time PCR system (Applied Biosystems). Copy numbers per microgram of genomic DNA were calculated from a standard curve of 10-fold serial dilutions of purified CAR plasmid containing 102-108 copies/μL. Amplification of an internal control gene was used for normalization of DNA quantities. Primers/probes specific for the CD19CAR transgene and an internal control gene were as previously described (See Gökbuget N. et al., Blood 2012; 120:2032-41 and O'Brien S. et al., J Clin Oncol 2013; 31:676-83).

[0339] Therapy response was assessed by flow cytometry and morphology. When possible, chimeric gene (CD19CAR) expression levels were assessed in the patients. The response type was defined as MRD-negative, complete response, complete response with incomplete count recovery, stable disease, and progressive disease, as previously described. MRD-negative was defined as less than 0.01% marrow blasts by flow cytometry. Complete response was defined as less than 5% marrow blasts, absence of circulating blasts, and no extramedullary sites of disease with absolute neutrophil counts of 1000 per μL or more and platelets 100,000 per μL or more. Complete response with incomplete count recovery was defined as a complete response with cytopenia. Stable disease was defined as a disease that did not meet the criteria for complete response, complete response with incomplete count recovery, or progressive disease. Progressive disease was defined as worse M status or no change in M status but a greater than 50% increase in absolute peripheral blast count. After CD19CAR T cell therapy, patients were followed up every week and underwent bone marrow examination including morphology, MRD status, chimeric gene expression and a CAR T cell count every 4 weeks.

[0340] The samples were collected in gel tubes and stored at 4° C. until centrifugation later the same day. All blood and CSF samples were then centrifuged at 5000 rpm for 6 minutes. The supernatants were transferred for subsequent analysis. The BD Cytometric Bead Array Human Th1/Th2/Th17 Cytokine Kit (BD Biosciences), FCAP Array v3.0 software (BD Biosciences), and a BD FACS CANTO II (BD Biosciences) were used for the measurement and analysis of the concentrations of the cytokines such as IL-2, IL-4, IL-6, IL-10, IL-17A, IFN-γ, and TNF-α. according to the manufacturer's instructions.

[0341] Erythrocyte-lysed whole BM samples were used for immunophenotyping on the day of bone marrow aspiration. Antigen expression of blast cells was systematically analyzed by flow cytometry (FACSCalibur flow cytometer, BD Biosciences, San Jose, Calif.) using four-color combinations of monoclonal antibodies (mAbs) with fluorescein isothiocyanate (FITC), phycoerythrin (PE), allophycocyanin (APC), and phycoerythrin-cyanin 7 (PE-Cy7). Cell-Quest software (Becton Dickinson Biosciences) was used for data analysis. Monoclonal antibodies were purchased from the following manufacturers: BD Biosciences, CD10-APC, CD19-FITC, CD22-PE, CD34-PE, CD45-PE-Cy7, cyCD79a-PE, surface immunoglobulin (sIg) M-PE, cytoplasmic immunoglobulin (cIg) M-APC; and Beckman Coulter, CD20-APC, sIg-Lamda-FITC, slg-Kappa-APC.

[0342] For the investigation of Minimal residual disease (MRD), the combination of mAbs was based on the aberrant phenotypes of leukemic blasts at diagnosis individually. The MRD results were presented as the percentage of cells with aberrant phenotypes among nucleated cells. A sensitivity of 0.01% was achieved in all samples analyzed. The instrument setup was calibrated daily by analyzing Calibrite™ beads and standard blood samples (BD™ Multi-Check Control from BD Biosciences or CD-chex™ Plus from Streck, Inc.) for quality control.

[0343] Conventional CAR T cells did not seem to be effective for treating solid tumor. Thus, the data of treating blood tumors using CAR T cells may be used to help enhance treatment of solid tumors using CAR T cells. Here, three patients with relapsed/refractory Chronic Lymphocytic Leukemia (R/R ALL) were treated with CD19CAR T cells (See Table 5). These results demonstrate that T cells expressing CD19edCAR establish antitumor effects in patients with R/R ALL. In addition, IL-6, IFNγ, and IL-10 were significantly elevated in the blood of the patients after the infusion of CD19CAR T cells, as compared to other factors (See FIGS. 11-13). Therefore, one or more of these cytokines may be expressed in CAR T cells to enhance treatment of solid tumors. Given that IL-10 inhibits anti-tumor activities and IFNγ reduces M2 macrophages (See Example below), IL-6 and IFNγ were first selected to be expressed or overexpressed in modified T cells for treating solid tumors and lymphoma. Further, modified cells having inducible expression of IL-6 and/or IFNγ were further generated to reduce or avoid risks of severe adverse reactions caused by the modified cells on subjects.

TABLE 5

| Patient | Tumor | CART Dosage | | CRS |
|---|---|---|---|---|
| ID | type | (×10E6/kg) | Response | grade |
| 001 | B-ALL | 4.8 | MRD (−) | 3 |
| 002 | B-ALL | 1.7 | MRD (−) | 4 |
| 003 | B-ALL | 2.8 | MRD (−) | 3 |

### Reducing M2 Macrophages by Modified Cells Expressing IFNγ

[0344] It has been reported that there are many kinds of cells in solid tumor tissues, including tumor cells and some immune cells. Among them, macrophages are the main cells in immune cells, mostly M2 macrophages. This solid tumor M2 type macrophages are inside tumor tissues and continuously secrete cytokines to nourish the tumor cells. FIGS. 14 and 15 show cytometry assay results of macrophage culturing and cell phenotype changes in response to cytokine added. M2 macrophages express CD613 but not CD80, while M1 macrophages express CD80 but not 163. Mononuclear cells were selected from the blood of healthy volunteers by sorting with CD14 microbeads. The cells were incubated with M2 medium (containing IL4) for 3 days at a density of 1×10⁶ cells/ml. After 3 days, the medium was changed, and the cell culture density was adjusted to 1×10⁶ cells/ml. After 4-6 days, 1×10⁶ cells were taken out, and the expression of CD14 and CD163 was detected by flow cytometry (FIG. 14). 1×10⁶ CAR+ cells were removed from the same volunteers at Day 7 and were added to 6-well plates. 4×10⁵ cells of M2 macrophage were added to each well, then 200 ng of IFNγ, 200 ng IL6, and 200 ng IL2 were added to each well, and the cells were cultured for 2 days. After 62 days, 1×10⁶ cells were removed, and the expression of CD14 and CD163 was detected by flow cytometry. FIG. 15 shows the expression of macrophage with CD163 or CD80 in various groups. These results showed that M2 macrophages can be converted to M1 macrophages, and cytokines such as IFNγ reduced the number of M2 macrophages and caused M2 macrophages to convert to M1 macrophages.

[0345] FIG. 16 shows cytometry assay results of macrophages co-cultured with various CAR T cells expressing IFN-γ and/or IL-6. Mononuclear cells were selected from the blood of healthy volunteers by sorting with CD14 microbeads. The cells were incubated with M2 medium (containing IL4) for 3 days at a density of 1×10⁶ cells/ml. After 3 days, the medium was changed, and the cell culture density was adjusted to 1×10\hat{ }6 cells/ml. After 4-6 days, 1×10⁶ cells were removed, and the expression of CD14 and CD163 was detected by flow cytometry. 1×10⁶ CAR+ cells were removed from the same volunteers on Day 7 and were added to 6-well plates. 4×10⁵ cells of M2 macrophages were added to each well for 3 days. After 63 days, 1×10⁶ cells were removed, and the expression of CD14 and CD163 was detected by flow cytometry. These results showed that CAR T cells expressing IFNγ reduced M2 macrophages and converted them to M1 macrophages.

[0346] Modified Cells Expressing Cytokines and In Vitro Assay

[0347] FIG. 18 shows copy numbers of T cells expressing various proteins. Day 1, T cells from a healthy donor were sorted and activated using CD3/CD28 beads. Day 2, 10⁵ cells were transfected with vectors 1230 (1230 represents h19CAR) (MOI 10:1), 6205 (hCD19CAR-GFP) (MOI 60:1), and 6221 (hCD19CAR-6×NFAT-IL6-2a-IFNg) (MOI 60:1), respectively. On Day 3, cell media were changed. On Day 4, cell numbers were counted. On Days 5, 6, and 8, assays for measuring culturing factors, CAR copy number, phenotype, and expression were conducted. Day 8, toxicity assays were performed, and culturing factors were detected. The copy numbers are provided in Table 6 below. In this and the following examples, the sequence for NFAT is SEQ ID NO 469; for TSHRCAR is SEQ ID NO: 279; for scFv of TSHRCAR is SEQ ID NO: 8; for scFv of CD19CAR is SEQ ID 5; for IL6 is SEQ ID NO: 287; for peptide 2A is SEQ ID NO: 327; and for IFNγ is SEQ ID NO: 328. The sequences of other components may be found in Table 2. Table 6 shows copy numbers of CAR per CAR T cell.

TABLE 6

| Type of T cells | 6205 | 6221 | 1230 |
|---|---|---|---|
| Day 8/per CAR-T | 1.02728 | 0.66634 | 1.3325 |

[0348] FIG. 18 shows flow cytometry assay results of T cells expressing various proteins shown in FIG. 17. On Day 0, peripheral blood of healthy volunteers was taken, and CD3+ T cells were sorted from the sample. CD3/CD28 Dynabeads were added to the stored CD3+ T cells at a 1:1 ratio. On Day 2, T cells were transfected using lentivirus including the following vectors. CD19CAR was infected according to the infection ratio of MOI=10:1; hCD19CAR, hCD19CAR-6×NFAT-GFP, hCD19CAR-6×NFAT-GFP, hCD19CAR-6×NFAT-IL6-2a-IFNγ cells were infected according to the infection ratio of MOI=60:1. On Day 3, the media were changed, the lentiviruses were removed, and the cells were resuspended in fresh medium. On Day 7, flow cytometry assays were used to detect CAR expression. CD19CAR is a humanized antibody and is therefore detected with a human CAR antibody. CD19CAR expression was 23.99%; hCD19CAR-6×NFAT-GFP CAR expression was 25%, and hCD19CAR-6×NFAT-IL6-2a-IFNg CAR expression was 17.6%. Flow cytometry assay was performed using human CAR antibody to detect the expression intensity and expression level of CAR.

[0349] FIG. 19 shows IL6 release in response to CD3/CD28 Dynabeads activation. On Day 0, peripheral blood of healthy volunteers was taken and CD3+ T cells were sorted from the sample. CD3/CD28 Dynabeads were added to the stored CD3+ cells at a 1:1 ratio. On Day 2, T cells were transfected using lentivirus including the following vectors. CD19CAR was infected according to the infection ratio of MOI=10:1; hCD19CAR, hCD19CAR-6×NFAT-GFP, hCD19CAR-6×NFAT-GFP, hCD19CAR-6×NFAT-IL6-2a-IFNg cells were infected according to the infection ratio of MOI=60:1. On Day 3, the media were changed, and the lentiviruses were removed, and the cells were resuspended in fresh medium. On Day 5, 6, and 8, 200 ul of cell supernatant was used to detect the release of IL6. As shown in FIG. 19, on Day 5, 6, and 8, 200 ul of cell supernatant was taken from the media and used to detect the release of IL6 factor. The amount of IL6 released per 10⁴ of CD19CAR and CD19CAR-6×NFAT-GFP was 0-10 pg/ml on Day 5, 6, and 8. 10⁴ CD19CAR-6×NFAT-IL6-2A-IFNg had IL6 release of 498 pg/ml and 378 pg/ml on Day 5 and 6, and the released amount of IL6 on Day 8 was 9.8 pg/ml. On Days 5 and 6, cells were cultured with CD3/CD28 Dynabeads such that the cells were activated, and NFAT element was activated, and the transcription of IL6 was enabled, causing IL6 to be released. However, on Day 8, the effect of Dynabeads stimulation was dropped to a lower level, and the cells were not activated. Therefore, the NFAT element was turned off, and the transcription of IL6 was disabled. Thus, IL6 was not released. When T cells are stimulated by CD3/28 Dynabeads, the cells are activated for a short period of time. The NFAT element induces transcriptional translation of the gene in response to the activation, and the corresponding genes are expressed. When the cells are at rest or at a lower level of activation, the NFAT element does not initiate transcriptional translation of the gene of interest. Therefore, whether the NFAT element is active or not and whether the induced gene is expressed can be determined by the expression of the target gene in the activated and inactivated state of the CAR T cell.

[0350] FIG. 20 shows IL6 release in response to co-culturing with Nalm6 cells (see Table 7 below). The cells were cultured to Day 8 and then were leveled with NT cells to differentiate the CAR ratio of CD19CAR T cells and CD19CAR-6×NFAT-GFP to cells of CD19CAR-6×NFAT-IL6-2a-IFNg. 104 CAR+ cells were co-cultured with 10⁴ 4 Nalm-6 cells or cultured separately. After 24 hours, the supernatant was collected, and the amount of IL6 released was measured. The cells were co-cultured with Nalm6 cells and were in an activated state. Thus, the NFAT element initiated transcription of IL6 in an activated state, allowing IL6 to be released. When the CAR T cells are co-cultured with the cells expressing the antigen to which the CAR binds (target cells), since the CAR T cells recognize the membrane proteins on the surface of the tumor cells, the cells are activated. The NFAT element initiates transcriptional translation of the gene in response to activation, and the corresponding gene is expressed. When the cell is at rest or when the activation level is low, the NFAT element does not initiate transcriptional translation of the gene of interest. Therefore, whether the NFAT element is active or not and whether the induced gene is expressed can be determined by the expression of the target gene in the activated and inactivated state of the CAR T cell.

TABLE 7

| | CART cells 10⁴ | | |
|---|---|---|---|
| | | CD19CAR- | CD19CAR-6xNFAT- |
| | CD19CAR-T | 6xNFAT-GFP | IL6-2a-IFNg |
| Co-cultured cells | Nalm6 | Nalm6 | Nalm6 |
| (25 hours) 10⁴ | | | |
| IL6 released: | 0-10 pg/ml | 0-10 pg/ml | 260 pg/ml |
| CAR T cells | | | |
| co-cultured | | | |
| with Nalm6 | | | |
| IL6 released | 0-10 pg/ml | 0-10 pg/ml | 0-10 pg/ml |
| CAR T cells | | | |
| cultured alone | | | |

[0351] FIG. 21 shows IFNγ (i.e., IFNg) release in response to CD3/CD28 Dynabeads activation. On day 0, peripheral blood of healthy volunteers was taken, and CD3+ T cells were sorted. CD3/CD28 Dynabeads were added in a 1:1 ratio. On Day 2, T cells were transfected using lentivirus including the following vectors. CD19CAR T cells were infected according to the infection ratio of MOI=10:1; hCD19CAR, hCD19CAR-6×NFAT-GFP, hCD19CAR-6×NFAT-GFP, hCD19CAR-6×NFAT-IL6-2a-IFNγ cells were infected according to the infection ratio of MOI=60:1. The lentiviruses were removed, and the cells were resuspended in fresh medium. On Days 5, 6, and 8, 200 ul of the cell supernatant was used to detect the release of IFNγ. On Days 5 and 6, cells were cultured with CD3/CD28 Dynabeads such that the cells were activated, and NFAT element was activated, which enabled the transcription of IFNγ and the release of IFNγ. However, on Day 8, the effect of Dynabeads stimulation has dropped to a lower level, and the cells were no longer activated. Therefore, the NFAT element was turned off, and transcription of IFNγ was disabled. Thus, IFNγ was not released. When T cells are stimulated by CD3/28 Dynabeads, the cells are activated for a short period of time. The NFAT element initiates transcriptional translation of the gene in response to the activation, and the corresponding genes are expressed. When the cells are at rest or at a lower level of activation, the NFAT element does not initiate transcriptional translation of the gene of interest. Therefore, whether the NFAT element is active or not and whether the induced gene is expressed can be determined by the expression of the target gene in the activated and inactivated state of the CAR T cell.

[0352] FIG. 22 shows IFNγ release in response to co-culturing with Nalm6 cells (See Table below 8). The cells were cultured to Day 8 and then were leveled with NT cells to differentiate the CAR ratio of CD19 CAR T cells and CD19CAR-6×NFAT-GFP to cells of CD19CAR-6×NFAT-IL6-2a-IFNg. 104 CAR+ cells were co-cultured with 10⁴ Nalm-6 cells or cultured separately. After 24 hours, the supernatant was collected, and the amount of IFNγ released was measured. The cells were co-cultured with Nalm6 cells and were in an activated state. Thus, the NFAT element initiated transcription of IFNγ in an activated state, allowing IFNγ to be released. When the CAR T cells are co-cultured with the target cells, the cells are activated because the CAR T cells recognize the membrane proteins on the surface of the tumor cells. The NFAT element initiates transcriptional translation of the gene to be expressed due to the activation, and the corresponding gene is expressed. When the cell is at rest or when the activation level is low, the NFAT element does not initiate transcriptional translation of the gene of interest. Therefore, whether the NFAT element is active or not and whether the induced gene is expressed can be determined by the expression of the target gene in the activated and inactivated state of the CAR T cell.

TABLE 8

| | CART cells 10e4 | | |
|---|---|---|---|
| | | CD19CAR- | CD19CAR-6xNFAT- |
| | CD19CAR-T | 6xNFAT-GFP | IL6-2a-IFNγ |
| Co-cultured cells | Nalm6 | Nalm6 | Nalm6 |
| (25 hours) 10e4 | | | |
| IFNγ released: | 2400-3200 pg/ml | 2400-3200 pg/ml | 7900 pg/ml |
| CAR T cells | | | |
| co-cultured | | | |
| with Nalm6 | | | |
| IFNγ released: | 2400-3200 pg/ml | 2400-3200 pg/ml | 2400-3200 pg/ml |
| CAR T cells | | | |
| cultured alone | | | |

[0353] FIG. 23 shows toxicity assay with respect to CAR T cells. T cells from a healthy donor were cultured to Day 8 and then were leveled with NT cells to differentiate the CAR ratio of CD19 CAR T cells and CD19CAR-6×NFAT-GFP to cells of CD19CAR-6×NFAT-IL6-2a-IFNγ. 3×10⁴ CAR+ cells were co-cultured with 104 Nalm-6 cells and 904 Nalm-6 cells, respectively. The residual of Nalm6 cells was detected after 24 hours. CD19CAR T cells, CD19CAR-6×NFAT-GFP cells, and CD19CAR-6×NFAT-IL6-2a-IFNg cells were co-cultured with Nalm6 cells in different ratios. There were no significant differences among the 3 cell groups. After the cells of CD19CAR, CD19CAR-6×NFAT-GFP, and CD19CAR-6×NFAT-IL6-2a-IFNγ were activated by the tumor, the T cells executed a killing function and acted on the target cells to cause the target cells to be killed.

[0354] FIG. 25 show IFNγ release, respectively, in response to co-culturing with Nalm6 cells. On Day 0, peripheral blood T cells were obtained from volunteers and stimulated using Dynabeads at 1:1 ratio. On Day 1, the cells were infected with lentiviral vectors. On Day 2, the media were changed. On Day 7, flow cytometry assays were used to detected CAR expression and CAR copy numbers. 1204 represents hCD19CAR cells, and 6107 represents hCD19CAR-2A-IL12 cells which express IL12 continuously. The CAR expression was normalized to 17%. 104 CAR positive cells and 104 Nalm6 or Nalm6-PDL1 tumor cells were co-cultured in 24-well plates for 24 hours, and the supernatant was assayed for IFNγ. 1204 had 49.50% CAR expression and 1.5 copies per CAR T cell, and 6107 had 23.76% CAR expression and 0.94 copies per CAR T cell. CAR was normalized to 17% for co-culture. Co-culture results, as shown in the histogram, showed that IFNγ produced by Nalm6-PDL1 stimulation for 1204 was about half that stimulated by Nalm6 wt because of the inhibitory effect of PDL1 on T cells. The release of IFNγ from 6107 reached about 10 times that of 1230, demonstrating that IL12 released by CAR T significantly promoted IFNγ release.

[0355] FIGS. 26 and 27 show IL12 and IFNγ release in response to CD3/CD28 Dynabeads activation. On Day 0, peripheral blood T cells were obtained from volunteers and stimulated using Dynabeads at 1:1 ratio. On Day 1, the cells were infected with lentiviral vectors. On Day 2, the media were changed. On day 9, flow cytometry was used to detect CAR expression. 1230 represents h19CAR, and 6209 represents h19CAR-6×NFAT-IL12 (conditional release of IL12 under T cell activation). The CAR expression was normalized to 30%. The same number of cells were stimulated by Dynabeads for 24 hours at a ratio of 1:3, and the supernatant was assayed for IL12 and IFNγ. There was 65% CAR expression in 1230 and 34% CAR expression in 6209. After normalization to 30%, CD3/CD28 Dynabeads were added. After 24 hours, the supernatant was assayed to collect information of cytokines, and results were presented as a histogram. Under the stimulation of Dynabeads, 6209 released an average of 55 pg of IL12 per 10⁴ of T cells. 1230 did not release IL12 with or without stimulation, and 6209 did not release IL12 without stimulation. This indicates that, originally, NFAT activated IL12 transcription under Dynabeads stimulation, as shown on the left. IFN was released as shown on the right. Both CAR T cells did not release IFNγ without stimulation, and 6209 released more IFNγ under Dynabeads stimulation, indicating that IL12 synergizes with 6209 CART cells to release more IFNγ.

[0356] FIGS. 28 and 29 show IL6 and IFNγ release in response to CD3/CD28 Dynabeads activation. On Day 0, peripheral blood T cells were obtained from volunteers and stimulated using Dynabeads at 1:1 ratio. On Day 1, the cells were infected with lentiviral vectors. On Day 2, the media were changed. On day 7, flow cytometry was used to detect CAR expression. 1230 represents hCD19CAR, and 6221 represents hCD19CAR-6×NFAT-IL6-2A-IFNγ (conditional release of IL6 and IFNγ under T cell activation). The CAR expression was normalized to 12.66%. The same number of cells were stimulated by Dynabeads for 24 hours at a ratio of 1:3, and the supernatant was assayed for IL6 and IFNγ. There was 67% CAR expression in 1230, and 29% CAR expression in 6221. The CAR expression was normalized 12.66%, and Dynabeads were added. After 24 hours, the supernatant was assayed to measure the cytokines. The results of the assay were presented as a histogram. Both cells were free of IL6 or IFNγ release without Dynabead activation. After addition of Dynabeads, 6221 released significantly more IL6, and IFNγ (based on the average number of pg released per 104 T cells).

[0357] FIGS. 30-38 show the induction of expression of cytokines by CAR T cells. The experiments were conducted using various solid tumor markers (e.g., TSHR, ACPP, and GUCY2C). The data show that activated CAR T cells can induce the expression of IL-6, IL-12, and/or IFNγ, and the expression of various factors is significantly lower under aerobic conditions than under anaerobic conditions. It has also been shown that the regulated expression of cytokines can up-regulate factors related to the killing function of other cytokines (e.g., IFNγ and GZMB). Various vectors as well as cells and their references described in FIGS. 30-38 are listed in Table 9.

TABLE 9

| Name | Construction | Name | Construction | Name | Construction |
|---|---|---|---|---|---|
| 1604 | TSHR-BBz | 6503 | ACPP-BBZ | 6701 | GUCY2C-bbz |
| 6918 | TSHR-28Z | 6521 | ACPP-bbz-NFAT6x- | 6923 | GUCY2C-28z |
| | | | IL6 | | |
| 6270 | TSHR-bbz- | 6523 | ACPP-bbz-NFAT6x- | 6278 | GUCY2C-bbz- |
| | NFAT6X-IL12- | | IFNg-2a-IL6 | | NFAT6X-IL12-VHL |
| | VHL | | | | |
| 6271 | TSHR-bbz- | 6524 | ACPP-bbz-NFAT6x- | 6279 | GUCY2C-28Z- |
| | NFAT6X-IL12- | | IFNg-2a-IL6VHL | | NFAT6X-IL12-VHL |
| | VHL | | | | |
| 6526 | ACPP-bbz- | 6525 | ACPP-bbz-NFAT6x- | | |
| | NFAT6x-IL6-2a- | | IL6-2a-IL12 | | |
| | IL12VHL | | | | |

Note:
BBZ: 4-1BB and CD3 zeta
28Z: CD28 and CD3 zeta

[0358] FIG. 30 shows the results of an anaerobic assay. Protocols of manufacture of CAR T cells and cell culturing were similar for those in vitro assays described herein. In the anaerobic system simulated by CoCl₂, it can be seen from FIG. 30 that the release of IL-12 is regulated by oxygen. With the prolongation of CoCl2, the release of IL-12 gradually increases, and IL-12 decreases significantly after 48 hours of withdrawal of CoCl2. FIG. 31 shows cytokine releases in response to hypoxia in TSHR-CART system. As shown, IL-12 was only expressed when 6270 and 6271 were activated and was regulated by the anaerobic switch VHL, and the release of IL12 was significantly increased under anaerobic conditions. FIGS. 32 and 33 show cytokine release in response to induction of IL-12 expression in CAR T cells. The expression of IL12 effectively up-regulated the expression of IFNγ and TNF-α, indicating that the system can further increase the release of IFNγ/TNF-α and enhance the function of CAR T cells by regulating the expression of IL-12. FIG. 34 shows cytokine release in response to hypoxia in GUCY2C-CAR T system. FIG. 35 shows IFNγ release in response to induction of IL-12 expression in CAR T cells. FIG. 36 shows IL-6 is induced by T cell activation, and T cell inactivation does not express IL-6; and induction of IL-6 expression can up-regulate the release of T cell killing function-related factors such as TNF-α, IFNγ, and GZMB. FIGS. 37 and 38 show cytokine release in response to hypoxia in ACPP-CAR T system. Further data show that the expression of IL-6, IFNγ, and/or IL-12 effectively up-regulated the expression of other inflammatory factors such as GZMB and TNF-α, thereby enhancing the function of CAR T cells.

[0359] FIG. 39 is cytokine release assay showing that IL-6 and IFNγ released by various types of CAR T cells under different conditions after the CAR T cells were cultured with or without antigen for 24 hours. The results show that CAR T cells expressing IFNγ-2A-IL-6 released more IL-6 and IFNγ in response to antigen activation as compared to (1) CAR T cells not expressing IL-6 and IFNγ and (2) CAR T cells expressing IL-6-2A-IFNγ. The data may indicate that CAR T cells comprising construct IFNγ-2A-IL-6 may have increased anti-tumor effect than CAR T cells comprising construct IL-6-2A-IFNγ.

### In Vivo Cell Expansion and Treatment of Cancer

[0360] These clinical studies were designed to assess the safety and efficacy of infusing autologous T cells modified to express TSHR specific CAR/4-1BB/CD3-(into patients. On the first arm of the studies, patients received TSHRCAR T cells only. On the second arm, patients received CAR T cells that bind 0019 and TSHR and express IL-6 and IFNγ, and/or IL-12. Autologous T cells modified to express TSHR specific CAR/4-1BB/CD3-ζ (TSHRCAR), 0019 specific CAR/4-1BB/CD3-ζ (CD19CAR), and IL-6 and IFNγ, and/or IL-12 were infused into patients. T cells from the patients were obtained, modified, and infused to the patients. T cell response of patients from the first and second arms were measured and compared using the following protocols, which were approved by the hospitals where the trials were conducted. All patients were provided with written informed consent. In the discussion below, the following abbreviations are used: SD: stable disease; PD: progressive disease; PR: partial remission; CR: complete remission; and NR, no response.

TABLE 10

| | | | | | Safety or | |
|---|---|---|---|---|---|---|
| | Patient | Target | Infusion | Vectors mixed | Adverse | |
| Cancer | ID (PID) | Marker | CART/kg | with T cells | reaction (AR) | Efficacy |
| Thyroid | 004 | TSHR | 1.1 × 10⁶ | Vector encoding | No apparent | NR |
| cancer | | | | TSHR-CAR | AR | |
| Thyroid | 005 | TSHR | 2.08 × 10⁹ | Vectors encoding | No apparent | PR (day |
| cancer | | | | TSHR-CAR & | AR (See | 90) |
| | | | | vectors encoding | below) | |
| | | | | CD19-CAR | | |
| Thyroid | 006 | TSHR | 1.36 × 10⁹ | Vectors encoding | No apparent | PR (day |
| cancer | | | | TSHR-CAR & | AR (See | 30) |
| | | | | vectors encoding | below) | |
| | | | | CD19-CAR-IL-6-2A- | | |
| | | | | IFNγ & vectors | | |
| | | | | encoding CD19- | | |
| | | | | CAR-IL-12 | | |
| Colorectal | 007 | GUCY2C | 3.78 × 10⁸ | Vectors encoding | No apparent | PR (day |
| cancer | | | | TSHR-CAR & | AR (See | 30) |
| | | | | vectors encoding | below) | |
| | | | | CD19-CAR-IL-6-2A- | | |
| | | | | IFNγ | | |

[0361] PBMCs were obtained from patients. Various lentiviral vectors were generated and then transfected into the T cells from the PBMCs, which were further cultured for several days before the co-cultivation assay. For Patients 004-007, information is provided in Table 11 and the descriptions below. Techniques related to cell cultures and cytotoxic T lymphocyte assay may be found in “Control of large, established tumor xenografts with genetically retargeted human T cells containing CD28 and CD137 domains,” PNAS, Mar. 3, 2009, vol. 106 no. 9, 3360-3365, which is incorporated herein by reference in its entirety.

TABLE 11

| | | Infusion | |
|---|---|---|---|
| PID | Vectors and MOI | Methods | Pre-treatment |
| 004 | Vector 1: TSHR-CAR (CAR: SEQ ID NO: 279, | Fresh | FC regimen at −5 |
| | scFv of the CAR: SEQ ID NO: 8): 19:1 (MOI) | cells | to −3 days |
| | | | (cyclophosphamide |
| | | | 500 mg/m2, |
| | | | fludarabine 30 |
| | | | mg/m2) |
| 005 | Vector 1: TSHR-CAR (CAR: SEQ ID NO: 279, | Fresh | FC regimen at −5 |
| | scFv of the CAR: SEQ ID NO: 8): 19:1 (MOI); and | cells | to −3 days |
| | Vector 2: hCD19-CAR-NATF-IL6-2A-IFNγ | | (cyclophosphamide |
| | (Vector SEQ ID NO: 532, scFv of CD19 CAR: | | 500 mg/m2, |
| | SEQ ID 5, 6xNFAT: SEQ ID: 469, aa of IL6: SEQ | | fludarabine 30 |
| | ID NO: 287, 2A is SEQ ID NO: 327, and aa of | | mg/m2) |
| | IFN-γ: SEQ ID NO: 328 (See the construct of | | |
| | Embodiment 1 of FIG. 10)): 5:1(MOI) | | |
| 006 | Vector 1: TSHR-CAR (CAR: SEQ ID NO: 279, | Fresh | FC regimen at −5 |
| | scFv of the CAR: SEQ ID NO: 8): 50:1(See MOI | cells | to −3 days |
| | in Table 12); Vector 2: hCD19-CAR-NATF-IL6- | | (cyclophosphamide |
| | 2A-IFNγ (Vector SEQ ID NO: 532, scFv of CD19 | | 500 mg/m2, |
| | CAR: SEQ ID 5, 6xNFAT: SEQ ID: 469, aa of | | fludarabine 30 |
| | IL6: SEQ ID NO: 287, 2A is SEQ ID NO: 327, | | mg/m2) |
| | and aa of IFN-γ: SEQ ID NO: 328 (See the | | |
| | construct in Embodiment 1 of FIG. 10)): 10:1 (See | | |
| | MOI in Table 12); and Vector 3: hCD19-CAR- | | |
| | NATF-IL12-VHL (Vector SEQ ID NO: 533, scFv | | |
| | of CD19 CAR: SEQ ID 5, 6xNFAT: SEQ ID: 469, | | |
| | aa of IL12: SEQ ID NO: 450, VHL: SEQ ID NO: | | |
| | 457 (See the construct of Embodiment 3 of FIG. | | |
| | 10): 1:1(SeeMOI in Table 12). | | |
| 007 | Vector 4: GUCY2C-CAR (CAR: SEQ ID NO: 535, | Fresh | FC regimen at −5 |
| | scFv of the CAR: SEQ ID NO: 11): 50:1(MOI); | cells | to −3 days |
| | and Vector 2: hCD19-CAR-NATF-IL6-2A-IFNγ | | (cyclophosphamide |
| | (Vector SEQ ID NO: 532, scFv of CD19 CAR: | | 500 mg/m2, |
| | SEQ ID 5, 6xNFAT: SEQ ID: 469, aa of IL6: SEQ | | fludarabine 30 |
| | ID NO: 287, 2A is SEQ ID NO: 327, and aa of | | mg/m2) |
| | IFN-γ: SEQ ID NO: 328 (See the construct of | | |
| | Embodiment 1 of FIG. 10)): 10:1(MQI) | | |

[0362] PBMCs were cultured using TEXMACS culture containing IL-2. CD4 and CD8 magnetic beads were used to sort and select T cells in the PBMCs. The appropriate starting culture amount was selected, and TransAct activator was used to activate T cells (003+ cells). MACS® GMP T Cell TransAct™ includes a colloidal polymeric nano matrix covalently attached to humanized recombinant agonists against human CD3 and CD28. Due to the nano matrix MACS, GMP T Cell TransAct can be sterile filtered, and excess reagent can be removed by centrifugation and following conventional supernatant replacement or simply by medium wash. This reagent is suitable for use in automated culture systems, such as the CliniMACS Prodigy® Instrument. The number of corresponding vectors and the volume of the vector were calculated according to the required vector MOI (See Table 11). For Patient 004, lentiviral vectors containing Vector 1 were mixed, for 24 hours, with the T cells, which were further washed and cultured for 8 days before being transported to the hospital. For Patients 005 and 007, lentiviral vectors containing Vector 1 and Vector 2 were mixed with the T cells for 24 hours. The T cells were further washed and cultured for 8 days before being transported to the hospital. For Patient 006, the T cells were divided into four groups, and each group of T cells were mixed with one or more lentiviral vectors for 24 hours (see Table 12), and these T cells were washed and cultured for 8 days. These four groups of transfected T cells were mixed and then transported to the hospital.

[0363] Various assays were performed to confirm the efficacy of these CAR T cells (e.g., a binding assay using flow cytometry and a killing assay using culturing assay with cells expressing TSHR/CD19), and quality assurance procedures were followed to ensure the safety of the administration of the CAR T cells to the patient. Independent primers of TSHR, IL-6 and IFN-γ, and/or IL-12 were used to detect the percentage of total vectors in CAR T cells by quantitative PCR (qPCR). The percentage was obtained by relative quantification using three vectors. The number of cycles at the threshold is used to determine the starting amount of the sample. For example, for Patient 006, the starting amount of IL-12 was defined as 1, and the relative quantification of IL-6, IFN-γ, and TSHR was calculated, and then the relative quantification of the three vectors was used as the denominator to calculate the percentage of each vector in the total amount. Further, the 4-1BB universal primer was used to detect the CAR copy number (i.e., the total CAR copy number) in the CAR T cells by qPCR. In addition, when Patient 006's CAR T cells were expanded in vitro to day 6, samples of the T cells were taken. The sample T cells were labeled with antibodies against hCD3, and T cells having CD19CAR and/or IL-6/IFN-γ vectors were labeled with antibodies against hCD19 scFv. Flow cytometry analysis was performed, and the results were used to calculated and obtain the ratio of T cells expressing CD19 CAR in total transfected T cells. These results are shown in Tables 12 and 13 as well as FIG. 52, which shows the expansion of T cells in each group.

TABLE 12

| | | | | | Total CAR | Ratio to Total | | |
|---|---|---|---|---|---|---|---|---|
| | | | Day 6 | | copy number | IL- | | |
| Group | Vector | MOI | hCAR+/CD3+ | CD19 scFv+/CD3+ | per ugDNA | 6/IFN-γ | IL12 | TSHR |
| 1 | 1 | 50 | 42.64% | 12.37% | 112238.97 | 8.27% | 0.21% | 91.52% |
| | 2 | 10 | | | | | | |
| | 3 | 1 | | | | | | |
| 2 | 1 | 50 | 59.28% | 33.32% | 118925.1 | 17.77% | 0.34% | 81.89% |
| | 2 | 10 | | | | | | |
| | 3 | 1 | | | | | | |
| 3 | 3 | 20 | 19.52% | 18.16% | 19408.75 | 0.00% | 100.00% | 0.00% |
| 4 | 3 | 20 | 26.70% | 26.59% | 17874.89 | 0.00% | 100.00% | 0.00% |

TABLE 13

Expansion times/Culturing Days

| | Group 1 | Group 2 | Group 3 | Group 3 |
|---|---|---|---|---|
| 0 | 1.00 | 1.00 | 1.00 | 1.00 |
| 2 | 0.87 | 0.78 | 0.74 | 0.78 |
| 3 | 1.76 | 1.56 | 1.37 | 1.80 |
| 4 | 3.80 | 3.83 | 3.08 | 4.20 |
| 5 | 8.60 | 8.10 | 7.45 | 10.10 |
| 6 | 14.04 | 14.60 | 16.01 | 16.17 |
| 7 | 19.49 | 15.86 | 20.28 | 22.82 |

[0364] For fresh cells, after removing the magnetic beads, the transduced cells were centrifuged or replaced with a solution of 95% compound electrolyte injection and 5% human albumin, loaded into a return bag and transported at 15-25° C. after sealing. Fresh preparations were returned directly. For cryopreserved cells, the transduced cells were transferred to the media including a compound electrolyte injection of 33.75% human albumin, 25% dextran, 40% glucose, and 33.75% DMSO 7.5%. The cell suspension was loaded into a cryopreservation bag, and then the procedure was cooled to −90° C. and transferred to a gas phase liquid nitrogen tank for storage. The reconstitution of the frozen preparations was completed within 30 minutes after resuscitation. PBMCs were obtained from patients by leukapheresis for CAR T cell preparation, and the first day of CAR T infusion was set as day 0.

[0365] Patients were given a conditioning treatment for lymphodepletion. Fludarabine- and cyclophosphamide-based conditioning treatment varied according to the tumor burden in the bone marrow (BM) and peripheral blood (PB). CAR T cells were transfused to patients. CAR T cells were transported to the hospital, washed, counted, checked for viability, and then prepared for administration to patients. After administration, the patients were observed closely for at least 2 hours. Cytokine Release Syndrome (CRS) was graded according to a revised grading system (see Lee D W. et al., Blood 2014; 124:188-95). Other toxicities during and after therapy were assessed according to the National Institutes of Health Common Terminology Criteria for Adverse Events Version 4.0 (http://ctep.cancer.gov/). Therapy responses were assessed by flow cytometry and morphological analysis. When possible, patients were assessed for levels of chimeric gene expression. The response type was defined as minimal residual disease (MRD) negative, complete response, complete response with incomplete count recovery, stable disease, and progressive disease.

[0366] Serial BM and PB samples after CAR T cell infusion were collected in K2EDTA BD vacutainer tubes (BD). The persistence of CD19CAR T cells from fresh PB and BM in patients was determined by FACS. Circulating CAR T cell numbers per μl were calculated on the basis of measured absolute CD3+ T lymphocyte counts. Simultaneously, CAR DNA copies were evaluated as another method of determining CAR T cell expansion and persistence. Genomic DNA was extracted using a QIAamp DNA Blood Mini Kit (Qiagen) from cryopreserved PB and BM. CAR DNA copies were assessed by quantitative real-time PCR as described in the supplementary materials. The levels of cytokines IFN-γ, TNF-α, IL-2, IL-4, IL-6, IL-10, IL-17, etc. in serum and CSF were measured in a multiplex format according to the manufacturer's instructions (see FIGS. 40-47). Genomic DNA from cryopreserved peripheral blood and bone marrow was extracted using a QIAamp DNA Blood Mini Kit (Qiagen). Quantitative PCR (q-PCR) was performed in real-time in triplicates using the ABI 2×TaqMan Universal Master Mix with AmpErase UNG (Applied Biosystems) in a 7500 real-time PCR system (Applied Biosystems). Copy numbers per microgram of genomic DNA were calculated from a standard curve of 10-fold serial dilutions of purified CAR plasmid containing 102-108 copies/μ. Amplification of an internal control gene was used for normalization of DNA quantities. Primers/probes specific for CAR19 and other transgenes and an internal control gene were as previously described (see Gökbuget N. et al., Blood 2012; 120:2032-41 and O'Brien S. et al., J Clin Oncol 2013; 31:676-83). CT Scanning and/or PET CT scanning was performed to evaluate CAR T therapy on patients.

[0367] For Patient 004, no apparent response (e.g., disappearance or shrink of target lesions) was observed after cell infusion. The patient also did not have any adverse reaction.

[0368] Patient 005 had undergone thyroidectomy. 29 days after the infusion, the right tumor disappeared, and the left tumor was reduced in size. Examples of PET CT scanning images are shown in FIG. 48. Three months after the infusion, the right tumor did not recur, and the left tumor disappeared. The PET CT images showed that there was no observable tumor recurrence, particularly in the surgical area. After the scanning signal was enhanced, no abnormal enhancement signal is observed in the above areas. The double neck II and Ill areas showed multiple small lymph nodes with a maximum short diameter of no more than 10 mm. No abnormalities were observed in the bilateral submandibular gland morphology based on CT scanning signals. At the same time, the cervical spinal cord morphology and CT signal were normal. It appeared that the patient had achieved at least partial remission (PR). During the treatment, no severe CRS (e.g., no greater than level 2 CRS) was observed in Patient 005. The patient was assessed to have achieved PR.

[0369] Patient 006 was diagnosed with poorly differentiated follicular papillary carcinoma with neuroendocrine carcinoma in the thyroid gland. Thyroid double lobe resection was performed. The patient was later examined and confirmed to have multiple lung metastases. Multiple enlarged lymph nodes were found in the mediastinum. 30 days after infusion of CAR T cells, CT scanning showed that the small tumors disappeared, and the size of the two major tumor was reduced by more than 70% (see Table 14). FIG. 49 shows that the major tumor shrank, and the small tumor disappeared (see lines as well circles in FIG. 49). During the treatment, no severe CRS (e.g., no greater than level 2 CRS) was observed in Patient 006 (see FIGS. 46 and 47). The patient was assessed to have achieved PR.

TABLE 14

| | Before | Estimated | | Estimated | | Estimated | |
|---|---|---|---|---|---|---|---|
| | Infusion | Volume | Day 4 | Volume | Day 30 | Volume | Reduced |
| Major tumor | (mm) | (mm³) | (mm) | (mm³) | (mm) | (mm³) | Volume |
| Right lower | 68 × 60 | 128112.00 | 70 × 61 | 136312.63 | 42 × 39 | 33431.58 | 73.90% |
| lobe | | | | | | | |
| Mediastinum | 25 | 65416.67 | 25 | 65416.67 | 15 | 14130.00 | 78.40% |
| and double | | | | | | | |
| hilar | | | | | | | |

[0370] Patient 007 was diagnosed with colorectal cancer and went through 8 cycles of chemotherapy as well as other treatments such as surgery before CAR T cell infusion. One month after the infusion, PET-CT scanning results show most of the target lesions were significantly reduced by more than 50%, and the comprehensive calculation of tumor reduction was 44.7%. The patient was assessed to have achieved PR (see arrows in FIG. 53).

[0371] These results demonstrate that, as compared to the infusion of CAR T cells targeting TSHR alone, T cells expressing CD19CAR, TSHRCAR, and IL6/IFNγ and IL-12 enhanced inhibition on the growth of thyroid cancer. Further, T cells expressing CD19CAR and TSHRCAR expanded more and released more cytokines (e.g., IL-6, IL-12 or IFN-γ) as compared to infusion of CAR T cells targeting TSHR alone. Further, CAR T cells expressing IFNγ and IL-6 effectively inhibited the growth of tumor cells, which has not been shown in conventional CAR T technology. Combining the results of the Examples above and the result of this Example seems to indicate that reduction of M2 macrophage caused by T cells expressing IFN-γ may attack tumor microenvironment and thus contribute to the inhibition of the growth of tumor cells.

[0372] FIGS. 50 and 51 show comparisons of cytokine releases among Patients 004, 005, and 006. As shown in FIG. 50, the comparisons show that CAR T cells in Patients 005 and 006 caused higher levels of IL-6 and IFNγ releases than in Patient 004. Also, CAR T cells in Patient 006 caused higher levels of IL-6 and IFNγ releases than those of Patient 005. As indicated in FIGS. 50 and 51, inducible IL-12 may enhance anti-tumor activities by increasing certain cytokine releases (e.g., IL-6 and IFNγ) but not for those inhibiting anti-tumor activities (e.g., IL-10).

[0373] All publications, patents and patent applications cited in this specification are incorporated herein by reference in their entireties as if each individual publication, patent or patent application were specifically and individually indicated to be incorporated by reference. While the foregoing has been described in terms of various embodiments, the skilled artisan will appreciate that various modifications, substitutions, omissions, and changes may be made without departing from the spirit thereof.

The application's sequence listing, which the Patent Office published only in electronic form, follows.

SEQUENCE LISTING (535 sequences)

SEQ ID NO: 1 - protein, 21 aa, Artificial Sequence
  Synthesized
MALPVTALLLPLALLLHAARP

SEQ ID NO: 2 - protein, 69 aa, Artificial Sequence
  Synthesized
AKPTTTPAPRPPTPAPTIASQPLSLRPEACRPAAGGAVHTRGLDFACDIYIWAPLAGTCGVLLLSLVIT

SEQ ID NO: 3 - protein, 42 aa, Artificial Sequence
  Synthesized
KRGRKKLLYIFKQPFMRPVQTTQEEDGCSCRFPEEEEGGCEL

SEQ ID NO: 4 - protein, 112 aa, Artificial Sequence
  Synthesized
RVKFSRSADAPAYKQGQNQLYNELNLGRREEYDVLDKRRGRDPEMGGKPRRKNPQEGLYNELQKDKMAEAYSEIGMKGERRRGKGHDGLYQGLSTATKDTYDALHMQALPPR

SEQ ID NO: 5 - protein, 242 aa, Artificial Sequence
  Synthesized
DIQMTQSPSSLSASVGDRVTITCRASQDISKYLNWYQQKPGKAPKLLIYHTSRLHSGVPSRFSGSGSGTDFTLTISSLQPEDFATYYCQQGNTLPYTFGQGTKVEIKGGGGSGGGGSGGGGSEVQLVESGGGLVQPGGSLRLSCAASGVSLPDYGVSWVRQAPGKGLEWVSVIWGSETTYYNSALKSRFTISRDNAKNSLYLQMNSLRAEDTAVYYCAKHYYYGGSYAMDYWGQGTLVTVSS

SEQ ID NO: 6 - protein, 242 aa, Artificial Sequence
  Synthesized
DIQMTQTTSSLSASLGDRVTISCRASQDISKYLNWYQQKPDGTVKLLIYHTSRLHSGVPSRFSGSGSGTDYSLTISNLEQEDIATYFCQQGNTLPYTFGGGTKLEITGGGGSGGGGSGGGGSEVKLQESGPGLVAPSQSLSVTCTVSGVSLPDYGVSWIRQPPRKGLEWLGVIWGSETTYYNSALKSRLTIIKDNSKSQVFLKMNSLQTDDTAIYYCAKHYYYGGSYAMDYWGQGTSVTVSS

SEQ ID NO: 7 - protein, 237 aa, Artificial Sequence
  Synthesized
DIQMTQSPASLSVSVGETVTITCRASENIYSNLAWYQQKQGKSPQLLVYVATNLADGVPSRFSGSGSGTQYSLKINSLQSEDFGSYYCQHFWGTPYTFGGGTKLGGGGSGGGGSGGGGSEVQLQQSGAELVKPGASVKLSCTASGFNINDTYMHWVKQRPEQGLEWIGRIDPANGNTKYDPKFQGKATITADTSSNTAYLQLSSLTSEDTAVYYCARGARGSRFAYWGQGTLVTVSA

SEQ ID NO: 8 - protein, 244 aa, Artificial Sequence
  Synthesized
QSVLTQPPSVSAAPGQKVTISCSGSSSDIGSNYVSWYQQFPGTAPKLLIYDNNKRPSAIPDRFSGSKSGTSATLGITGLQTGDEADYYCGTWDSRLGIAVFGGGTQLTVLGGGGSGGGGSGGGGSEVQLVQSGAEVKKPGQSLKISCKASGYSLTDNWIGWVRQKPGKGLEWMGIIYPGDSDTRYSPSFQGQVTISADKSINTAYLQWSSLKASDTAIYYCVGLDWNYNPLRYWGPGTLVTVSS

SEQ ID NO: 9 - protein, 252 aa, Artificial Sequence
  Synthesized
DIVLTQSPASLAVSLGQGATISCRASKSVSTSGYTYMHWYQQKPGQPPKLLIYLASNLESGVPARFSGSGSGTDFTLNIHPVEEEDAATYYCQHSGELPPSFGGGTKLEIKRAGGGGSGGGGSGGGGSEVQLVESGGDLVKPGGSLKLSCAVSGFTFSSYGMSWVRQTPDKRLEWVATVSSGGTYTYYPDSVKGRFTISRDNAKNTLYLQMSSLKSEDSAMYYCARHRGNYYATYYYAMDYWGQGTSVTVSS

SEQ ID NO: 10 - protein, 243 aa, Artificial Sequence
  Synthesized
DVQITQSPSYLAASPGETITINCRASKSISKYLAWYQEKPGKTNKLLIYSGSTLQSGIPSRFSGSGSGTDFTLTISSLEPEDFAMYYCQQHHEYPYTFGGGTKLEIKGGGGSGGGGSGGGGSQVQLQQPGAELVRPGASVKLSCKASGYTFTTYWMNWVKQRPEQGLEWIGRIDPYDSETHYNQKFKDKAILTVDKSSSTAYMQLSSLTSEDSAVYYCARGPYYGTNPWFPYWGQGTLVTVSS

SEQ ID NO: 11 - protein, 241 aa, Artificial Sequence
  Synthesized
EIVMTQSPATLSVSPGERATLSCRASQSVSRNLAWYQQKPGQAPRLLIYGASTRATGIPARFSGSGSGTEFTLTIGSLQSEDFAVYYCQQYKTWPRTFGQGTNVEIKGGGGSGGGGSGGGGSQVQLQQWGAGLLKPSETLSLTCAVFGGSFSGYYWSWIRQPPGKGLEWIGEINHRGNTNDNPSLKSRVTISVDTSKNQFALKLSSVTAADTAVYYCARERGYTYGNFDHWGQGTLVTVSS

SEQ ID NO: 12 - protein, 246 aa, Artificial Sequence
  Synthesized
DVVMTQTPLSLPVRLGDQASISCRSSQSLVHSNGNTYLHWYLQKPGQSPKLLIYKVSNRFSGVPDRFSGSGSGTNFTLKISRVEAEDLGLYFCSQSTHVPYTFGGGTKLEIKRAGGGGSGGGGSGGGGSQVQLRQSGPELVKPGASVKMSCKASGYTFTDYVISWVKQRTGQGLEWIGDIYPGSGYSFYNENFKGKATLTADKSSTTAYMQLSSLTSEDSAVYFCATYYNYPFAYWGQGTLVTVSA

SEQ ID NO: 13 - protein, 199 aa, Artificial Sequence
  Synthesized
LPICPGGAARCQVTLRDLFDRAVVLSHYIHNLSSEMFSEFDKRYTHGRGFITKAINSCHTSSLATPEDKEQAQQMNQKDFLSLIVSILRSWNEPLYHLVTEVRGMQEAPEAILSKAVEIEEQTKRLLEGMELIVSQVHPETKENEIYPVWSGLPSLQMADEESRLSAYYNLLHCLRRDSHKIDNYLKLLKCRIIHNNNC

SEQ ID NO: 14 - protein, 240 aa, Artificial Sequence
  Synthesized
DIVMTQSPDSLAVSLGERATINCKSSQSLLNSRTRKNYLAWYQQKPGQPPKLLIYWASTRESGVPDRFSGSGSGTDFTLTISSLQAEDVAVYYCTQSFILRTFGQGTKVEIKGGGGGSGGGGSGGGGSDIVMTQSPDSLAVSLGERATINCKSSQSLLNSRTRKNYLAWYQQKPGQPPKLLIYWASTRESGVPDRFSGSGSGTDFTLTISSLQAEDVAVYYCTQSFILRTFGQGTKVEIK

SEQ ID NO: 15 - protein, 281 aa, Artificial Sequence
  Synthesized
MNVPTQLLGLLLLWLTGGKCDIQMTQSPASLSASLEEIVTITCKASQAIDAYLSWYQQKPGKSPQLLIYDATSLADGVPSRFSGSRSGTQYSLKISRPQVDDSGIYYCLQSYSTPFTFGSGTKLEIKGGGGGSGGGGSGGGGSMAVLVLLLCLLIFPSCVLSQVQLKESGPGLVQPSQTLSLTCTVSGSSLTSNSVSWIRQPPGKGLEWMGVIWSNGDADYNSAIKSRLSISRDTSKSQVFLKMNSLQTEDTAMYFCASPYYGYYFPFDYWGQGVMVTVSS

SEQ ID NO: 16 - protein, 285 aa, Artificial Sequence
  Synthesized
METDTLLLWVLLLWVPGSTGDIVLTQSPALAVSLGQRATISCRASQSVSISSHDLMQWYQQKPGQQPKLLIYDAFNLASGIPVRFSGSGSGTDFTLTIDPVQADDIATYYCQQSKDDPYTFGAGTKLELKGGGGGSGGGGSGGGGSMDIRLSLAFLVLFIKGVQCEVQLVESGGGLVQPGRSMKLSCAASGFTFSNYGMAWVRQAPTKGLEWVATISYDGSITYYRDSVKGRFTISRDHAKSTLYLQMNSLRSEDTATYYCTREEQYSSWYFDFWGPGIMVTVSS

SEQ ID NO: 17 - protein, 242 aa, Artificial Sequence
  Synthesized
NIVMTQSPSSLSASVGDRVTITCQASQDVGTAVAWYQQKPDQSPKLLIYWTSTRHTGVPDRFTGSGSGTDFTLTISSLQPEDIATYFCHQYNSYNTFGSGTKLEIKGGGGGSGGGGSGGGGSQVTLKESGPVLVKPTETLTLTCTFSGFSLSTSGMGVGWIRQAPGKGLEWVAHIWWDDDVYYNPSLKSRLTITKDASKDQVSLKLSSVTAADTAVYYCVRRRATGTGFDYWGQGTLVTVSS

SEQ ID NO: 18 - protein, 272 aa, Homo sapiens
PEEPLVVKVEEGDNAVLQCLKGTSDGPTQQLTWSRESPLKPFLKLSLGLPGLGIHMRPLAIWLFIFNVSQQMGGFYLCQPGPPSEKAWQPGWTVNVEGSGELFRWNVSDLGGLGCGLKNRSSEGPSSPSGKLMSPKLYVWAKDRPEIWEGEPPCLPPRDSLNQSLSQDLTMAPGSTLWLSCGVPPDSVSRGPLSWTHVHPKGPKSLLSLELKDDRPARDMWVMETGLLLPRATAQDAGKYYCHRGNLTMSFHLEITARPVLWHWLLRTGGWK

SEQ ID NO: 19 - protein, 205 aa, Homo sapiens
ISSMDMERPGDGKCQPIEIPMCKDIGYNMTRMPNLMGHENQREAAIQLHEFAPLVEYGCHGHLRFFLCSLYAPMCTEQVSTPIPACRVMCEQARLKCSPIMEQFNFKWPDSLDCRKLPNKNDPNYLCMEAPNNGSDEPTRGSGLFPPLFRPQRPHSAQEHPLKDGGPGRGGCDNPGKFHHVEKSASCAPLCTPGVDVYWSREDKR

SEQ ID NO: 20 - protein, 393 aa, Homo sapiens
GMGCSSPPCECHQEEDFRVTCKDIQRIPSLPPSTQTLKLIETHLRTIPSHAFSNLPNISRIYVSIDVTLQQLESHSFYNLSKVTHIEIRNTRNLTYIDPDALKELPLLKFLGIFNTGLKMFPDLTKVYSTDIFFILEITDNPYMTSIPVNAFQGLCNETLTLKLYNNGFTSVQGYAFNGTKLDAVYLNKNKYLTVIDKDAFGGVYSGPSLLDVSQTSVTALPSKGLEHLKELIARNTWTLKKLPLSLSFLHLTRADLSYPSHCCAFKNQKKIRGILESLMCNESSMQSLRQRKSVNALNSPLHQEYEENLGDSIVGYKEKSKFQDTHNNAHYYVFFEEQEDEIIGFGQELKNPQEETLQAFDSHYDYTICGDSEDMVCTPKSDEFNPCEDIMG

SEQ ID NO: 21 - protein, 210 aa, Homo sapiens
QLPPGKPEIFKCRSPNKETFTCWWRPGTDGGLPTNYSLTYHREGETLMHECPDYITGGPNSCHFGKQYTSMWRTYIMMVNATNQMGSSFSDELYVDVTYIVQPDPPLELAVEVKQPEDRKPYLWIKWSPPTLIDLKTGWFTLLYEIRLKPEKAAEWEIHFAGQQTEFKILSLHPGQKYLVQVRCKPDHGYWSAWSPATFIQIPSDFTMND

SEQ ID NO: 22 - protein, 4368 aa, Homo sapiens
EQDLSVNRAVWDGGGCISQGDVLNRQCQQLSQHVRTGSAANTATGTTSTNVVEPRMYLSCSTNPEMTSIESSVTSDTPGVSSTRMTPTESRTTSESTSDSTTLFPSSTEDTSSPTTPEGTDVPMSTPSEESISSTMAFVSTAPLPSFEAYTSLTYKVDMSTPLTTSTQASSSPTTPESTTIPKSTNSEGSTPLTSMPASTMKVASSEAITLLTTPVEISTPVTISAQASSSPTTAEGPSLSNSAPSGGSTPLTRMPLSVMLVVSSEASTLSTTPAATNIPVITSTEASSSPTTAEGTSIPTSTYTEGSTPLTSTPASTMPVATSEMSTLSITPVDTSTLVTTSTEPSSLPTTAEATSMLTSTLSEGSTPLTNMPVSTILVASSEASTTSTIPVDSKTFVTTASEASSSPTTAEDTSIATSTPSEGSTPLTSMPVSTTPVASSEASNLSTTPVDSKTQVTTSTEASSSPPTAEVNSMPTSTPSEGSTPLTSMSVSTMPVASSEASTLSTTPVDTSTPVTTSSEASSSSTTPEGTSIPTSTPSEGSTPLTNMPVSTRLVVSSEASTTSTTPADSNTFVTTSSEASSSSTTAEGTSMPTSTYSERGTTITSMSVSTTLVASSEASTLSTTPVDSNTPVTTSTEATSSSTTAEGTSMPTSTYTEGSTPLTSMPVNTTLVASSEASTLSTTPVDTSTPVTTSTEASSSPTTADGASMPTSTPSEGSTPLTSMPVSKTLLTSSEASTLSTTPLDTSTHITTSTEASCSPTTTEGTSMPISTPSEGSPLLTSIPVSITPVTSPEASTLSTTPVDSNSPVTTSTEVSSSPTPAEGTSMPTSTYSEGRTPLTSMPVSTTLVATSAISTLSTTPVDTSTPVTNSTEARSSPTTSEGTSMPTSTPGEGSTPLTSMPDSTTPVVSSEARTLSATPVDTSTPVTTSTEATSSPTTAEGTSIPTSTPSEGTTPLTSTPVSHTLVANSEASTLSTTPVDSNTPLTTSTEASSPPPTAEGTSMPTSTPSEGSTPLTRMPVSTTMVASSETSTLSTTPADTSTPVTTYSQASSSSTTADGTSMPTSTYSEGSTPLTSVPVSTRLVVSSEASTLSTTPVDTSIPVTTSTEASSSPTTAEGTSIPTSPPSEGTTPLASMPVSTTLVVSSEANTLSTTPVDSKTQVATSTEASSPPPTAEVTSMPTSTPGERSTPLTSMPVRHTPVASSEASTLSTSPVDTSTPVTTSAETSSSPTTAEGTSLPTSTTSEGSTLLTSIPVSTTLVTSPEASTLLTTPVDTKGPVVTSNEVSSSPTPAEGTSMPTSTYSEGRTPLTSIPVNTTLVASSAISILSTTPVDNSTPVTTSTEACSSPTTSEGTSMPNSNPSEGTTPLTSIPVSTTPVVSSEASTLSATPVDTSTPGTTSAEATSSPTTAEGISIPTSTPSEGKTPLKSIPVSNTPVANSEASTLSTTPVDSNSPVVTSTAVSSSPTPAEGTSIAISTPSEGSTALTSIPVSTTTVASSEINSLSTTPAVTSTPVTTYSQASSSPTTADGTSMQTSTYSEGSTPLTSLPVSTMLVVSSEANTLSTTPIDSKTQVTASTEASSSTTAEGSSMTISTPSEGSPLLTSIPVSTTPVASPEASTLSTTPVDSNSPVITSTEVSSSPTPAEGTSMPTSTYTEGRTPLTSITVRTTPVASSAISTLSTTPVDNSTPVTTSTEARSSPTTSEGTSMPNSTPSEGTTPLTSIPVSTTPVLSSEASTLSATPIDTSTPVTTSTEATSSPTTAEGTSIPTSTLSEGMTPLTSTPVSHTLVANSEASTLSTTPVDSNSPVVTSTAVSSSPTPAEGTSIATSTPSEGSTALTSIPVSTTTVASSETNTLSTTPAVTSTPVTTYAQVSSSPTTADGSSMPTSTPREGRPPLTSIPVSTTTVASSEINTLSTTLADTRTPVTTYSQASSSPTTADGTSMPTPAYSEGSTPLTSMPLSTTLVVSSEASTLSTTPVDTSTPATTSTEGSSSPTTAGGTSIQTSTPSERTTPLAGMPVSTTLVVSSEGNTLSTTPVDSKTQVTNSTEASSSATAEGSSMTISAPSEGSPLLTSIPLSTTPVASPEASTLSTTPVDSNSPVITSTEVSSSPIPTEGTSMQTSTYSDRRTPLTSMPVSTTVVASSAISTLSTTPVDTSTPVTNSTEARSSPTTSEGTSMPTSTPSEGSTPFTSMPVSTMPVVTSEASTLSATPVDTSTPVTTSTEATSSPTTAEGTSIPTSTLSEGTTPLTSIPVSHTLVANSEVSTLSTTPVDSNTPFTTSTEASSPPPTAEGTSMPTSTSSEGNTPLTRMPVSTTMVASFETSTLSTTPADTSTPVTTYSQAGSSPTTADDTSMPTSTYSEGSTPLTSVPVSTMPVVSSEASTHSTTPVDTSTPVTTSTEASSSPTTAEGTSIPTSPPSEGTTPLASMPVSTTPVVSSEAGTLSTTPVDTSTPMTTSTEASSSPTTAEDIVVPISTASEGSTLLTSIPVSTTPVASPEASTLSTTPVDSNSPVVTSTEISSSATSAEGTSMPTSTYSEGSTPLRSMPVSTKPLASSEASTLSTTPVDTSIPVTTSTETSSSPTTAKDTSMPISTPSEVSTSLTSILVSTMPVASSEASTLSTTPVDTRTLVTTSTGTSSSPTTAEGSSMPTSTPGERSTPLTNILVSTTLLANSEASTLSTTPVDTSTPVTTSAEASSSPTTAEGTSMRISTPSDGSTPLTSILVSTLPVASSEASTVSTTAVDTSIPVTTSTEASSSPTTAEVTSMPTSTPSETSTPLTSMPVNHTPVASSEAGTLSTTPVDTSTPVTTSTKASSSPTTAEGIVVPISTASEGSTLLTSIPVSTTPVASSEASTLSTTPVDTSIPVTTSTEGSSSPTTAEGTSMPISTPSEVSTPLTSILVSTVPVAGSEASTLSTTPVDTRTPVTTSAEASSSPTTAEGTSMPISTPGERRTPLTSMSVSTMPVASSEASTLSRTPADTSTPVTTSTEASSSPTTAEGTGIPISTPSEGSTPLTSIPVSTTPVAIPEASTLSTTPVDSNSPVVTSTEVSSSPTPAEGTSMPISTYSEGSTPLTGVPVSTTPVTSSAISTLSTTPVDTSTPVTTSTEAHSSPTTSEGTSMPTSTPSEGSTPLTYMPVSTMLVVSSEDSTLSATPVDTSTPVTTSTEATSSTTAEGTSIPTSTPSEGMTPLTSVPVSNTPVASSEASILSTTPVDSNTPLTTSTEASSSPPTAEGTSMPTSTPSEGSTPLTSMPVSTTTVASSETSTLSTTPADTSTPVTTYSQASSSPPIADGTSMPTSTYSEGSTPLTNMSFSTTPVVSSEASTLSTTPVDTSTPVTTSTEASLSPTTAEGTSIPTSSPSEGTTPLASMPVSTTPVVSSEVNTLSTTPVDSNTLVTTSTEASSSPTIAEGTSLPTSTTSEGSTPLSIMPLSTTPVASSEASTLSTTPVDTSTPVTTSSPTNSSPTTAEVTSMPTSTAGEGSTPLTNMPVSTTPVASSEASTLSTTPVDSNTFVTSSSQASSSPATLQVTTMRMSTPSEGSSSLTTMLLSSTYVTSSEASTPSTPSVDRSTPVTTSTQSNSTPTPPEVITLPMSTPSEVSTPLTIMPVSTTSVTISEAGTASTLPVDTSTPVITSTQVSSSPVTPEGTTMPIWTPSEGSTPLTTMPVSTTRVTSSEGSTLSTPSVVTSTPVTTSTEAISSSATLDSTTMSVSMPMEISTLGTTILVSTTPVTRFPESSTPSIPSVYTSMSMTTASEGSSSPTTLEGTTTMPMSTTSERSTLLTTVLISPISVMSPSEASTLSTPPGDTSTPLLTSTKAGSFSIPAEVTTIRISITSERSTPLTTLLVSTTLPTSFPGASIASTPPLDTSTTFTPSTDTASTPTIPVATTISVSVITEGSTPGTTIFIPSTPVTSSTADVFPATTGAVSTPVITSTELNTPSTSSSSTTTSFSTTKEFTTPAMTTAAPLTYVTMSTAPSTPRTTSRGCTTSASTLSATSTPHTSTSVTTRPVTPSSESSRPSTITSHTIPPTFPPAHSSTPPTTSASSTTVNPEAVTTMTTRTKPSTRTTSFPTVTTTAVPTNTTIKSNPTSTPTVPRTTTCFGDGCQNTASRCKNGGTWDGLKCQCPNLYYGELCEEVVSSIDIGPPETISAQMELTVTVTSVKFTEELKNHSSQEFQEFKQTFTEQMNIVYSGIPEYVGVNITKLRLGSVVVEHDVLLRTKYTPEYKTVLDNATEVVKEKITKVTTQQIMINDICSDMMCFNTTGTQVQNITVTQYDPEEDCRKMAKEYGDYFVVEYRDQKPYCISPCEPGFSVSKNCNLGKCQMSLSGPQCLCVTTETHWYSGETCNQGTQKSLVYG

SEQ ID NO: 23 - protein, 407 aa, Homo sapiens
SQVSQNCHNGSYEISVLMMGNSAFAEPLKNLEDAVNEGLEIVRGRLQNAGLNVTVNATFMYSDGLIHNSGDCRSSTCEGLDLLRKISNAQRMGCVLIGPSCTYSTFQMYLDTELSYPMISAGSFGLSCDYKETLTRLMSPARKLMYFLVNFWKTNDLPFKTYSWSTSYVYKNGTETEDCFWYLNALEASVSYFSHELGFKVVLRQDKEFQDILMDHNRKSNVIIMCGGPEFLYKLKGDRAVAEDIVIILVDLFNDQYFEDNVTAPDYMKNVLVLTLSPGNSLLNSSFSRNLSPTKRDFALAYLNGILLFGHMLKIFLENGENITTPKFAHAFRNLTFEGYDGPVTLDDWGDVDSTMVLLYTSVDTKKYKVLLTYDTHVNKTYPVDMSPTFTWKNSKLPNDITGRGPQ

SEQ ID NO: 24 - protein, 264 aa, Homo sapiens
PRFMGTISDVKTNVQLLKGRVDNISTLDSEIKKNSDGMEAAGVQIQMVNESLGYVRSQFLKLKTSVEKANAQIQILTRSWEEVSTLNAQIPELKSDLEKASALNTKIRALQGSLENMSKLLKRQNDILQVVSQGWKYFKGNFYYFSLIPKTWYSAEQFCVSRNSHLTSVTSESEQEFLYKTAGGLIYWIGLTKAGMEGDWSWVDDTPFNKVQSVRFWIPGEPNNAGNNEHCGNIKAPSLQAWNDAPCDKTFLFICKRPYVPSEP

SEQ ID NO: 25 - protein, 100 aa, Homo sapiens
DGNEEMGGITQTPYKVSISGTTVILTCPQYPGSEILWQHNDKNIGGDEDDKNIGSDEDHLSLKEFSELEQSGYYVCYPRGSKPEDANFYLYLRARVCENC

SEQ ID NO: 26 - protein, 371 aa, Homo sapiens
KKVVLGKKGDTVELTCTASQKKSIQFHWKNSNQIKILGNQGSFLTKGPSKLNDRADSRRSLWDQGNFPLIIKNLKIEDSDTYICEVEDQKEEVQLLVFGLTANSDTHLLQGQSLTLTLESPPGSSPSVQCRSPRGKNIQGGKTLSVSQLELQDSGTWTCTVLQNQKKVEFKIDIVVLAFQKASSIVYKKEGEQVEFSFPLAFTVEKLTGSGELWWQAERASSSKSWITFDLKNKEVSVKRVTQDPKLQMGKKLPLHLTLPQALPQYAGSGNLTLALEAKTGKLHQEVNLVVMRATQLQKNLTCEVWGPTSPKLMLSLKLENKEAKVSKREKAVWVLNPEAGMWQCLLSDSGQVLLESNIKVLPTWSTPVQP

SEQ ID NO: 27 - protein, 348 aa, Homo sapiens
RLSWYDPDFQARLTRSNSKCQGQLEVYLKDGWHMVCSQSWGRSSKQWEDPSQASKVCQRLNCGVPLSLGPFLVTYTPQSSIICYGQLGSFSNCSHSRNDMCHSLGLTCLEPQKTTPPTTRPPPTTTPEPTAPPRLQLVAQSGGQHCAGVVEFYSGSLGGTISYEAQDKTQDLENFLCNNLQCGSFLKHLPETEAGRAQDPGEPREHQPLPIQWKIQNSSCTSLEHCFRKIKPQKSGRVLALLCSGFQPKVQSRLVGGSSICEGTVEVRQGAQWAALCDSSSARSSLRWEEVCREQQCGSVNSYRVLDAGDPTSRGLFCPHQKLSQCHELWERNSYCKKVFVTCQDPNP

SEQ ID NO: 28 - DNA, 7902 bp, Artificial Sequence
  Synthesized
gtcgacactagtaatcaacctctggattacaaaatttgtgaaagattgactggtattcttaactatgttgctccttttacgctatgtggatacgctgctttaatgcctttgtatcatgctattgcttcccgtatggctttcattttctcctccttgtataaatcctggttgctgtctctttatgaggagttgtggcccgttgtcaggcaacgtggcgtggtgtgcactgtgtttgctgacgcaacccccactggttggggcattgccaccacctgtcagctcctttccgggactttcgctttccccctccctattgccacggcggaactcatcgccgcctgccttgcccgctgctggacaggggctcggctgttgggcactgacaattccgtggtgttgtcggggaagctgacgtcctttccatggctgctcgcctgtgttgccacctggattctgcgcgggacgtccttctgctacgtcccttcggccctcaatccagcggaccttccttcccgcggcctgctgccggctctgcggcctcttccgcgtcttcgccttcgccctcagacgagtcggatctccctttgggccgcctccccgcctgccgcggaattcgagctcggtacctttaagaccaatgacttacaaggcagctgtagatcttagccactttttaaaagaaaaggggggactggaagggctaattcactcccaacgaagacaagatctgctttttgcttgtactgagtctctctggttagaccagatctgagcctgggagctctctggctaactagggaacccactgcttaagcctcaataaagcttgccttgagtgcttcaagtagtgtgtgcccgtctgttgtgtgactctggtaactagagatccctcagacccttttagtcagtgtggaaaatctctagcagtagtagttcatgtcatcttattattcagtatttataacttgcaaagaaatgaatatcagagagtgagaggaacttgtttattgcagcttataatggttacaaataaagcaatagcatcacaaatttcacaaataaagcatttttttcactgcattctagttgtggtttgtccaaactcatcaatgtatcttatcatgtctggctctagctatcccgcccctaactccgcccatcccgcccctaactccgcccagttccgcccattctccgccccatggctgactaattttttttatttatgcagaggccgaggccgcctcggcctctgagctattccagaagtagtgaggaggcttttttggaggcctagggacgtacccaattcgccctatagtgagtcgtattacgcgcgctcactggccgtcgttttacaacgtcgtgactgggaaaaccctggcgttacccaacttaatcgccttgcagcacatccccctttcgccagctggcgtaatagcgaagaggcccgcaccgatcgcccttcccaacagttgcgcagcctgaatggcgaatgggacgcgccctgtagcggcgcattaagcgcggcgggtgtggtggttacgcgcagcgtgaccgctacacttgccagcgccctagcgcccgctcctttcgctttcttcccttcctttctcgccacgttcgccggctttccccgtcaagctctaaatcgggggctccctttagggttccgatttagtgctttacggcacctcgaccccaaaaaacttgattagggtgatggttcacgtagtgggccatcgccctgatagacggtttttcgccctttgacgttggagtccacgttctttaatagtggactcttgttccaaactggaacaacactcaaccctatctcggtctattcttttgatttataagggattttgccgatttcggcctattggttaaaaaatgagctgatttaacaaaaatttaacgcgaattttaacaaaatattaacgcttacaatttaggtggcacttttcggggaaatgtgcgcggaacccctatttgtttatttttctaaatacattcaaatatgtatccgctcatgagacaataaccctgataaatgcttcaataatattgaaaaaggaagagtatgagtattcaacatttccgtgtcgcccttattcccttttttgcggcattttgccttcctgtttttgctcacccagaaacgctggtgaaagtaaaagatgctgaagatcagttgggtgcacgagtgggttacatcgaactggatctcaacagcggtaagatccttgagagttttcgccccgaagaacgttttccaatgatgagcacttttaaagttctgctatgtggcgcggtattatcccgtattgacgccgggcaagagcaactcggtcgccgcatacactattctcagaatgacttggttgagtactcaccagtcacagaaaagcatcttacggatggcatgacagtaagagaattatgcagtgctgccataaccatgagtgataacactgcggccaacttacttctgacaacgatcggaggaccgaaggagctaaccgcttttttgcacaacatgggggatcatgtaactcgccttgatcgttgggaaccggagctgaatgaagccataccaaacgacgagcgtgacaccacgatgcctgtagcaatggcaacaacgttgcgcaaactattaactggcgaactacttactctagcttcccggcaacaattaatagactggatggaggcggataaagttgcaggaccacttctgcgctcggcccttccggctggctggtttattgctgataaatctggagccggtgagcgtggctctcgcggtatcattgcagcactggggccagatggtaagccctcccgtatcgtagttatctacacgacggggagtcaggcaactatggatgaacgaaatagacagatcgctgagataggtgcctcactgattaagcattggtaactgtcagaccaagtttactcatatatactttagattgatttaaaacttcatttttaatttaaaaggatctaggtgaagatcctttttgataatctcatgaccaaaatcccttaacgtgagttttcgttccactgagcgtcagaccccgtagaaaagatcaaaggatcttcttgagatcctttttttctgcgcgtaatctgctgcttgcaaacaaaaaaaccaccgctaccagcggtggtttgtttgccggatcaagagctaccaactctttttccgaaggtaactggcttcagcagagcgcagataccaaatactgttcttctagtgtagccgtagttaggccaccacttcaagaactctgtagcaccgcctacatacctcgctctgctaatcctgttaccagtggctgctgccagtggcgataagtcgtgtcttaccgggttggactcaagacgatagttaccggataaggcgcagcggtcgggctgaacggggggttcgtgcacacagcccagcttggagcgaacgacctacaccgaactgagatacctacagcgtgagctatgagaaagcgccacgcttcccgaagggagaaaggcggacaggtatccggtaagcggcagggtcggaacaggagagcgcacgagggagcttccagggggaaacgcctggtatctttatagtcctgtcgggtttcgccacctctgacttgagcgtcgatttttgtgatgctcgtcaggggggcggagcctatggaaaaacgccagcaacgcggcctttttacggttcctggccttttgctggccttttgctcacatgttctttcctgcgttatcccctgattctgtggataaccgtattaccgcctttgagtgagctgataccgctcgccgcagccgaacgaccgagcgcagcgagtcagtgagcgaggaagcggaagagcgcccaatacgcaaaccgcctctccccgcgcgttggccgattcattaatgcagctggcacgacaggtttcccgactggaaagcgggcagtgagcgcaacgcaattaatgtgagttagctcactcattaggcaccccaggctttacactttatgcttccggctcgtatgttgtgtggaattgtgagcggataacaatttcacacaggaaacagctatgaccatgattacgccaagcgcgcaattaaccctcactaaagggaacaaaagctggagctgcaagcttaatgtagtcttatgcaatactcttgtagtcttgcaacatggtaacgatgagttagcaacatgccttacaaggagagaaaaagcaccgtgcatgccgattggtggaagtaaggtggtacgatcgtgccttattaggaaggcaacagacgggtctgacatggattggacgaaccactgaattgccgcattgcagagatattgtatttaagtgcctagctcgatacataaacggctctctctggttagaccagatctgagcctgggagctctctggctaactagggaacccactgcttaagcctcaataaagcttgccttgagtgcttcaagtagtgtgtgcccgtctgttgtgtgactctggtaactagagatccctcagacccttttagtcagtgtggaaaatctctagcagtggcgcccgaacagggacttgaaagcgaaagggaaaccagaggagctctctcgacgcaggactcggcttgctgaagcgcgcacggcaagaggcgaggggcggcgactggtgagtacgccaaaaattttgactagcggaggctagaaggagagagatgggtgcgagagcgtcagtattaagcgggggagaattagatcgcgatgggaaaaaattcggttaaggccagggggaaagaaaaaatataaattaaaacatatagtatgggcaagcagggagctagaacgattcgcagttaatcctggcctgttagaaacatcagaaggctgtagacaaatactgggacagctacaaccatcccttcagacaggatcagaagaacttagatcattatataatacagtagcaaccctctattgtgtgcatcaaaggatagagataaaagacaccaaggaagctttagacaagatagaggaagagcaaaacaaaagtaagaccaccgcacagcaagcggccgctgatcttcagacctggaggaggagatatgagggacaattggagaagtgaattatataaatataaagtagtaaaaattgaaccattaggagtagcacccaccaaggcaaagagaagagtggtgcagagagaaaaaagagcagtgggaataggagctttgttccttgggttcttgggagcagcaggaagcactatgggcgcagcgtcaatgacgctgacggtacaggccagacaattattgtctggtatagtgcagcagcagaacaatttgctgagggctattgaggcgcaacagcatctgttgcaactcacagtctggggcatcaagcagctccaggcaagaatcctggctgtggaaagatacctaaaggatcaacagctcctggggatttggggttgctctggaaaactcatttgcaccactgctgtgccttggaatgctagttggagtaataaatctctggaacagatttggaatcacacgacctggatggagtgggacagagaaattaacaattacacaagcttaatacactccttaattgaagaatcgcaaaaccagcaagaaaagaatgaacaagaattattggaattagataaatgggcaagtttgtggaattggtttaacataacaaattggctgtggtatataaaattattcataatgatagtaggaggcttggtaggtttaagaatagtttttgctgtactttctatagtgaatagagttaggcagggatattcaccattatcgtttcagacccacctcccaaccccgaggggacccgacaggcccgaaggaatagaagaagaaggtggagagagagacagagacagatccattcgattagtgaacggatctcgacggtatcgatcacgagactagcctcgacacaaatggcagtattcatccacaattttaaaagaaaaggggggattggggggtacagtgcaggggaaagaatagtagacataatagcaacagacatacaaactaaagaattacaaaaacaaattacaaaaattcaaaattttcgggtttattacagggacagcagaaatccactttggctcgagaagcttgatatcggctccggtgcccgtcagtgggcagagcgcacatcgcccacagtccccgagaagttggggggaggggtcggcaattgaaccggtgcctagagaaggtggcgcggggtaaactgggaaagtgatgtcgtgtactggctccgcctttttcccgagggtgggggagaaccgtatataagtgcagtagtcgccgtgaacgttctttttcgcaacgggtttgccgccagaacacaggatccgccaccatggccttaccagtgaccgccttgctcctgccgctggccttgctgctccacgccgccaggccggatatccagatgacccagagcccgagcagcctgagcgcgagcgtgggtgatcgcgtgaccattacctgcagggcaagtcaggacattagtaaatatttaaattggtatcagcagaaaccgggtaaagcgccgaaactgttaatttatcatacatcaagattacactcaggcgtgccgtcgcgttttagcggctcgggttcgggcaccgattttaccctgaccatctcgagcttgcagccggaggacttcgccacctactattgccaacagggtaatacgcttccgtacacgttcggtcagggcaccaaagtggagatcaaaggtggcggtggctcgggcggtggtgggtcgggtggcggcggatctgaggtgcagctggtggagtctgggggaggcttggtacagcctggggggtccctgagactctcctgtgcagcctctggagtgtccctgcctgattatggcgtgtcctgggtccgccaggctccagggaaggggctggagtgggtttcagtgatctggggcagcgagacaacctactacaacagcgccctgaagtcccgattcaccatctccagagacaatgccaagaactcactgtatctgcaaatgaacagcctgagagccgaggacacggctgtgtattactgtgcgaagcactactactacggcggcagctacgctatggactactggggccaaggaaccctggtcaccgtgtcctcaaccacgacgccagcgccgcgaccaccaacaccggcgcccaccatcgcgtcgcagcccctgtccctgcgcccagaggcgtgccggccagcggcggggggcgcagtgcacacgagggggctggacttcgcctgtgatatctacatctgggcgcccttggccgggacttgtggggtccttctcctgtcactggttatcaccctttactgcaaacggggcagaaagaaactcctgtatatattcaaacaaccatttatgagaccagtacaaactactcaagaggaagatggctgtagctgccgatttccagaagaagaagaaggaggatgtgaactgagagtgaagttcagcaggagcgcagacgcccccgcgtacaagcagggccagaaccagctctataacgagctcaatctaggacgaagagaggagtacgatgttttggacaagaggcgtggccgggaccctgagatggggggaaagccgagaaggaagaaccctcaggaaggcctgtacaatgaactgcagaaagataagatggcggaggcctacagtgagattgggatgaaaggcgagcgccggaggggcaaggggcacgatggcctttaccagggtctcagtacagccaccaaggacacctacgacgcccttcacatgcaggccctgccccctcgctaatctagaggcgcgcc

SEQ ID NO: 29 - protein, 66 aa, Artificial Sequence
  Synthesized
TTTPAPRPPTPAPTIASQPLSLRPEACRPAAGGAVHTRGLDFACDIYIWAPLAGTCGVLLLSLVIT

SEQ ID NO: 30 - protein, 69 aa, Artificial Sequence
  Synthesized
TTTPAPRPPTPAPTIASQPLSLRPEACRPAAGGAVHTRGLDFACDIYIWAPLAGTCGVLLLSLVITLYC

SEQ ID NO: 31 - protein, 72 aa, Artificial Sequence
  Synthesized
AKPTTTPAPRPPTPAPTIASQPLSLRPEACRPAAGGAVHTRGLDFACDIYIWAPLAGTCGVLLLSLVITLYC

SEQ ID NO: 32 - protein, 69 aa, Artificial Sequence; identical to SEQ ID NO: 2
  Synthesized

SEQ ID NO: 33 - protein, 50 aa, Artificial Sequence
  Synthesized
AKPTTTPAPRPPTPAPTIASQPLSLRPEACRPAAGGAVHTRGLDFACDIY

SEQ ID NO: 34 - protein, 50 aa, Artificial Sequence; identical to SEQ ID NO: 33
  Synthesized

SEQ ID NO: 35 - protein, 47 aa, Artificial Sequence
  Synthesized
TTTPAPRPPTPAPTIASQPLSLRPEACRPAAGGAVHTRGLDFACDIY

SEQ ID NO: 36 - protein, 47 aa, Artificial Sequence; identical to SEQ ID NO: 35
  Synthesized

SEQ ID NO: 37 - protein, 22 aa, Artificial Sequence
  Synthesized
IWAPLAGTCGVLLLSLVITLYC

SEQ ID NO: 38 - protein, 22 aa, Artificial Sequence
  Synthesized
IWAPLAGTCGVLLLSLVITLYC

SEQ ID NO: 39 - protein, 270 aa, Artificial Sequence
  Synthesized
PEEPLVVKVEEGDNAVLQCLKGTSDGPTQQLTWSRESPLKPFLKLSLGLPGLGIHMRPLAIWLFIFNVSQQMGGFYLCQPGPPSEKAWQPGWTVNVEGSGELFRWNVSDLGGLGCGLKNRSSEGPSSPSGKLMSPKLYVWAKDRPEIWEGEPPCLPPRDSLNQSLSQDLTMAPGSTLWLSCGVPPDSVSRGPLSWTHVHPKGPKSLLSLELKDDRPARDMWVMETGLLLPRATAQDAGKYYCHRGNLTMSFHLEITARPVLWHWLLRTGG

SEQ ID NO: 40 - protein, 19 aa, Artificial Sequence
  Synthesized
IWAPLAGTCGVLLLSLVIT

SEQ ID NO: 41 - DNA, 339 bp, Artificial Sequence
  Synthesized
agagtgaagttcagcaggagcgcagacgcccccgcgtaccagcagggccagaaccagctctataacgagctcaatctaggacgaagagaggagtacgatgttttggacaagaggcgtggccgggaccctgagatggggggaaagccgagaaggaagaaccctcaggaaggcctgtacaatgaactgcagaaagataagatggcggaggcctacagtgagattgggatgaaaggcgagcgccggaggggcaaggggcacgatggcctttaccagggtctcagtacagccaccaaggacacctacgacgcccttcacatgcaggccctgccccctcgctaa

SEQ ID NO: 42 - DNA, 1689 bp, Artificial Sequence
  Synthesized
cggctccggtgcccgtcagtgggcagagcgcacatcgcccacagtccccgagaagttggggggaggggtcggcaattgaaccggtgcctagagaaggtggcgcggggtaaactgggaaagtgatgtcgtgtactggctccgcctttttcccgagggtgggggagaaccgtatataagtgcagtagtcgccgtgaacgttctttttcgcaacgggtttgccgccagaacacaggatccgccaccatggccttaccagtgaccgccttgctcctgccgctggccttgctgctccacgccgccaggccggacatccagctcacccagtccccgagctcgctgtccgcctccgtgggagatcgggtcaccatcacgtgccgcgccagccagtcgatttcctcctacctgaactggtaccaacagaagcccggaaaagccccgaagcttctcatctacgccgcctcgagcctgcagtcaggagtgccctcacggttctccggctccggttccggtactgatttcaccctgaccatttcctccctgcaaccggaggacttcgctacttactactgccagcagtcgtactccaccccctacactttcggacaaggcaccaaggtcgaaatcaagggtggcggtggctcgggcggtggtgggtcgggtggcggcggatctgaagtgcaattggtggaatcagggggaggacttgtgcagcctggaggatcgctgagactgtcatgtgccgtgtccggctttgccctgtccaaccacgggatgtcctgggtccgccgcgcgcctggaaagggcctcgaatgggtgtcgggtattgtgtacagcggtagcacctactatgccgcatccgtgaaggggagattcaccatcagccgggacaactccaggaacactctgtacctccaaatgaattcgctgaggccagaggacactgccatctactactgctccgcgcatggcggagagtccgacgtctggggacaggggaccaccgtgaccgtgtctagcaccacgacgccagcgccgcgaccaccaacaccggcgcccaccatcgcgtcgcagcccctgtccctgcgcccagaggcgtgccggccagcggcggggggcgcagtgcacacgagggggctggacttcgcctgtgatatctacatctgggcgcccttggccgggacttgtggggtccttctcctgtcactggttatcaccctttactgcaaacggggcagaaagaaactcctgtatatattcaaacaaccatttatgagaccagtacaaactactcaagaggaagatggctgtagctgccgatttccagaagaagaagaaggaggatgtgaactgagagtgaagttcagcaggagcgcagacgcccccgcgtaccagcagggccagaaccagctctataacgagctcaatctaggacgaagagaggagtacgatgttttggacaagaggcgtggccgggaccctgagatggggggaaagccgagaaggaagaaccctcaggaaggcctgtacaatgaactgcagaaagataagatggcggaggcctacagtgagattgggatgaaaggcgagcgccggaggggcaaggggcacgatggcctttaccagggtctcagtacagccaccaaggacacctacgacgcccttcacatgcaggccctgccccctcgctaa

SEQ ID NO: 43 - DNA, 1689 bp, Homo sapiens
cggctccggtgcccgtcagtgggcagagcgcacatcgcccacagtccccgagaagttggggggaggggtcggcaattgaaccggtgcctagagaaggtggcgcggggtaaactgggaaagtgatgtcgtgtactggctccgcctttttcccgagggtgggggagaaccgtatataagtgcagtagtcgccgtgaacgttctttttcgcaacgggtttgccgccagaacacaggatccgccaccatggccttaccagtgaccgccttgctcctgccgctggccttgctgctccacgccgccaggccggacatccagctcacccagtccccgagctcgctgtccgcctccgtgggagatcgggtcaccatcacgtgccgcgccagccagtcgatttcctcctacctgaactggtaccaacagaagcccggaaaagccccgaagcttctcatctacgccgcctcgagcctgcagtcaggagtgccctcacggttctccggctccggttccggtactgatttcaccctgaccatttcctccctgcaaccggaggacttcgctacttactactgccagcagtcgtactccaccccctacactttcggacaaggcaccaaggtcgaaatcaagggtggcggtggctcgggcggtggtgggtcgggtggcggcggatctgaagtgcaattggtggaatcagggggaggacttgtgcagcctggaggatcgctgagactgtcatgtgccgtgtccggctttgccctgtccaaccacgggatgtcctgggtccgccgcgcgcctggaaagggcctcgaatgggtgtcgggtattgtgtacagcggtagcacctactatgccgcatccgtgaaggggagattcaccatcagccgggacaactccaggaacactctgtacctccaaatgaattcgctgaggccagaggacactgccatctactactgctccgcgcatggcggagagtccgacgtctggggacaggggaccaccgtgaccgtgtctagcaccacgacgccagcgccgcgaccaccaacaccggcgcccaccatcgcgtcgcagcccctgtccctgcgcccagaggcgtgccggccagcggcggggggcgcagtgcacacgagggggctggacttcgcctgtgatatctacatctgggcgcccttggccgggacttgtggggtccttctcctgtcactggttatcaccctttactgcaaacggggcagaaagaaactcctgtatatattcaaacaaccatttatgagaccagtacaaactactcaagaggaagatggctgtagctgccgatttccagaagaagaagaaggaggatgtgaactgagagtgaagttcagcaggagcgcagacgcccccgcgtacaagcagggccagaaccagctctataacgagctcaatctaggacgaagagaggagtacgatgttttggacaagaggcgtggccgggaccctgagatggggggaaagccgagaaggaagaaccctcaggaaggcctgtacaatgaactgcagaaagataagatggcggaggcctacagtgagattgggatgaaaggcgagcgccggaggggcaaggggcacgatggcctttaccagggtctcagtacagccaccaaggacacctacgacgcccttcacatgcaggccctgccccctcgctaa

SEQ ID NO: 44 - DNA, 1689 bp, Artificial Sequence; identical to SEQ ID NO: 42
  Synthesized

SEQ ID NO: 45 - DNA, 1689 bp, Artificial Sequence; identical to SEQ ID NO: 43
  Synthesized

SEQ ID NO: 46 - protein, 106 aa, Artificial Sequence
  Synthesized
NIVMTQSPSSLSASVGDRVTITCQASQDVGTAVAWYQQKPDQSPKLLIYWTSTRHTGVPDRFTGSGSGTDFTLTISSLQPEDIATYFCHQYNSYNTFGSGTKLEIK

SEQ ID NO: 47 - protein, 120 aa, Artificial Sequence
  Synthesized
QVTLKESGPVLVKPTETLTLTCTFSGFSLSTSGMGVGWIRQAPGKGLEWVAHIWWDDDVYYNPSLKSRLTITKDASKDQVSLKLSSVTAADTAVYYCVRRRATGTGFDYWGQGTLVTVSS

SEQ ID NO: 48 - protein, 130 aa, Artificial Sequence
  Synthesized
METDTLLLWVLLLWVPGSTGDIVLTQSPALAVSLGQRATISCRASQSVSISSHDLMQWYQQKPGQQPKLLIYDAFNLASGIPVRFSGSGSGTDFTLTIDPVQADDIATYYCQQSKDDPYTFGAGTKLELK

SEQ ID NO: 49 - protein, 139 aa, Artificial Sequence
  Synthesized
MDIRLSLAFLVLFIKGVQCEVQLVESGGGLVQPGRSMKLSCAASGFTFSNYGMAWVRQAPTKGLEWVATISYDGSITYYRDSVKGRFTISRDHAKSTLYLQMNSLRSEDTATYYCTREEQYSSWYFDFWGPGIMVTVSS

SEQ ID NO: 50 - protein, 112 aa, Artificial Sequence
  Synthesized
DIVMTQSPDSLAVSLGERATINCKSSQSLLNSRTRKNYLAWYQQKPGQPPKLLIYWASTRESGVPDRFSGSGSGTDFTLTISSLQAEDVAVYYCTQSFILRTFGQGTKVEIK

SEQ ID NO: 51 - protein, 119 aa, Artificial Sequence
  Synthesized
EVQLVQSGAEVKKPGASVKVSCKASGYTFTNYYIHWVRQAPGQGLEWIGWIYPGDGNTKYNEKFKGRATLTADTSTSTAYLELSSLRSEDTAVYYCARDSYSNYYFDYWGQGTLVTVSS

SEQ ID NO: 52 - protein, 413 aa, Artificial Sequence
  Synthesized
MRPADLLQLVLLLDLPRDLGGMGCSSPPCECHQEEDFRVTCKDIQRIPSLPPSTQTLKLIETHLRTIPSHAFSNLPNISRIYVSIDVTLQQLESHSFYNLSKVTHIEIRNTRNLTYIDPDALKELPLLKFLGIFNTGLKMFPDLTKVYSTDIFFILEITDNPYMTSIPVNAFQGLCNETLTLKLYNNGFTSVQGYAFNGTKLDAVYLNKNKYLTVIDKDAFGGVYSGPSLLDVSQTSVTALPSKGLEHLKELIARNTWTLKKLPLSLSFLHLTRADLSYPSHCCAFKNQKKIRGILESLMCNESSMQSLRQRKSVNALNSPLHQEYEENLGDSIVGYKEKSKFQDTHNNAHYYVFFEEQEDEIIGFGQELKNPQEETLQAFDSHYDYTICGDSEDMVCTPKSDEFNPCEDIMG

SEQ ID NO: 53 - protein, 115 aa, Artificial Sequence
  Synthesized
EVQLLESGGGLVQPGGSLRLSCAASGFTFSSYAMNWVRQAPGKGLEWVSAILSSGGSTYYADSVKGRFTISRDNSKNTLYLQMNSLRAEDTAVYYCARYWPMDIWGQGTLVTVSS

SEQ ID NO: 54 - protein, 108 aa, Artificial Sequence
  Synthesized
EIVLTQSPGTLSLSPGERATLSCRGGQSVSSSYLAWYQQKPGQAPRLLMYDASIRATGIPDRFSGSGSGTDFTLTISRLEPEDFAVYYCQQYQSWPLTFGQGTKVEIK

SEQ ID NO: 55 - protein, 140 aa, Artificial Sequence
  Synthesized
MGWSCIILFLVATATGVHSEVQLVESGGGLMQPKGSLKLSCAASGFTFKTYALNWVRQAPGTGLEWVARIRSKSNNYTTYYADSVKDRFTISRDDSQNMLYLQMNNLKTEDTAMYYCVRPQSGTSFAYWGQGTLVTVSAA

SEQ ID NO: 56 - protein, 131 aa, Artificial Sequence
  Synthesized
MGWSCIILFLVATATGVHSNIVLTQSPASLAVSLGQRATISCRASESVDSYGNSFMHWYQQKPGQPPKLLIYLASNLESGVPARFSGSGSRTDFTLTIDPVEADDVATYYCQQNNGDPYTFGGGTKLEIIR

SEQ ID NO: 57 - protein, 120 aa, Artificial Sequence
  Synthesized
QVQLVQSGGGVVQPGKSLRLSCAASGFTFSIFAMHWVRQAPGKGLEWVATISYDGSNAFYADSVEGRFTISRDNSKDSLYLQMDSLRPEDTAVYYCVKAGDGGYDVFDSWGQGTLVTVSS

SEQ ID NO: 58 - protein, 111 aa, Artificial Sequence
  Synthesized
EIVMTQSPLSLPVTPGEPASISCRSSQSLLHSNGYNYLDWYLQKPGQSPQLLIYLGSNRASGVPDRFSGSGSGTDFTLKISRVEAEDVGVYYCMQALQTPTFGPGTKVDIK

SEQ ID NO: 59 - DNA, 1473 bp, Artificial Sequence
  Synthesized
atggccttaccagtgaccgccttgctcctgccgctggccttgctgctccacgccgccaggccggatatccagatgacccagagcccaagctccctgtccgcctctgtgggcgacagggtgaccatcacatgccgcgccagccagacaatctggtcctacctgaactggtatcagcagagacccggcaaggcccctaatctgctgatctacgcagcatctagcctgcagtctggagtgccctcccggttctctggaagaggatccggaaccgacttcaccctgacaatctcctctctgcaggccgaggacttcgccacatactattgccagcagagctattccatccctcagacctttggccagggcacaaagctggagatcaagggcggcggcggctctggaggaggaggaagcggaggaggaggatcccaggtgcagctgcagcagagcggaccaggactggtgaagccctcccagaccctgtctctgacatgtgccatcagcggcgattccgtgagctccaacagcgccgcctggaattggatccggcagtctcccagcagaggactggagtggctgggaaggacctactatcgctccaagtggtacaacgattatgccgtgtctgtgaagagccggatcaccatcaaccctgacacatctaagaatcagttcagcctgcagctgaattccgtgaccccagaggacacagccgtgtactattgtgcaagggaggtgaccggcgacctggaggatgcctttgacatctggggccagggcaccatggtgacagtgtctagcaccacgacgccagcgccgcgaccaccaacaccggcgcccaccatcgcgtcgcagcccctgtccctgcgcccagaggcgtgccggccagcggcggggggcgcagtgcacacgagggggctggacttcgcctgtgatatctacatctgggcgcccttggccgggacttgtggggtccttctcctgtcactggttatcaccctttactgcaaacggggcagaaagaaactcctgtatatattcaaacaaccatttatgagaccagtacaaactactcaagaggaagatggctgtagctgccgatttccagaagaagaagaaggaggatgtgaactgagagtgaagttcagcaggagcgcagacgcccccgcgtacaagcagggccagaaccagctctataacgagctcaatctaggacgaagagaggagtacgatgttttggacaagaggcgtggccgggaccctgagatggggggaaagccgagaaggaagaaccctcaggaaggcctgtacaatgaactgcagaaagataagatggcggaggcctacagtgagattgggatgaaaggcgagcgccggaggggcaaggggcacgatggcctttaccagggtctcagtacagccaccaaggacacctacgacgcccttcacatgcaggccctgccccctcgctaa

SEQ ID NO: 60 - DNA, 1446 bp, Artificial Sequence
  Synthesized
atggccttaccagtgaccgccttgctcctgccgctggccttgctgctccacgccgccaggccggacatccagctcacccagtccccgagctcgctgtccgcctccgtgggagatcgggtcaccatcacgtgccgcgccagccagtcgatttcctcctacctgaactggtaccaacagaagcccggaaaagccccgaagcttctcatctacgccgcctcgagcctgcagtcaggagtgccctcacggttctccggctccggttccggtactgatttcaccctgaccatttcctccctgcaaccggaggacttcgctacttactactgccagcagtcgtactccaccccctacactttcggacaaggcaccaaggtcgaaatcaagggtggcggtggctcgggcggtggtgggtcgggtggcggcggatctgaagtgcaattggtggaatcagggggaggacttgtgcagcctggaggatcgctgagactgtcatgtgccgtgtccggctttgccctgtccaaccacgggatgtcctgggtccgccgcgcgcctggaaagggcctcgaatgggtgtcgggtattgtgtacagcggtagcacctactatgccgcatccgtgaaggggagattcaccatcagccgggacaactccaggaacactctgtacctccaaatgaattcgctgaggccagaggacactgccatctactactgctccgcgcatggcggagagtccgacgtctggggacaggggaccaccgtgaccgtgtctagcaccacgacgccagcgccgcgaccaccaacaccggcgcccaccatcgcgtcgcagcccctgtccctgcgcccagaggcgtgccggccagcggcggggggcgcagtgcacacgagggggctggacttcgcctgtgatatctacatctgggcgcccttggccgggacttgtggggtccttctcctgtcactggttatcaccctttactgcaaacggggcagaaagaaactcctgtatatattcaaacaaccatttatgagaccagtacaaactactcaagaggaagatggctgtagctgccgatttccagaagaagaagaaggaggatgtgaactgagagtgaagttcagcaggagcgcagacgcccccgcgtacaagcagggccagaaccagctctataacgagctcaatctaggacgaagagaggagtacgatgttttggacaagaggcgtggccgggaccctgagatggggggaaagccgagaaggaagaaccctcaggaaggcctgtacaatgaactgcagaaagataagatggcggaggcctacagtgagattgggatgaaaggcgagcgccggaggggcaaggggcacgatggcctttaccagggtctcagtacagccaccaaggacacctacgacgcccttcacatgcaggccctgccccctcgctaa

SEQ ID NO: 61 - DNA, 1467 bp, Artificial Sequence
  Synthesized
atggccttaccagtgaccgccttgctcctgccgctggccttgctgctccacgccgccaggccggacatcgtgatgacccagtccccctccagcctgacagtgacagccggcgagaaggtgacaatgatctgtaagtccagccagagcctgctgaacagcggcgaccagaagaactacctgacctggtaccagcagaagcctggccagccccccaagctgctgatcttctgggccagcacaagggagagcggcgtgcccgacagattcacaggcagcggcagcggcaccgacttcacactgaccatttcctccgtgcaggccgaggacctcgccgtgtactactgccagaacgactactcctaccccctgacattcggcgccggcaccaaactggagctgaagggtggcggtggctcgggcggtggtgggtcgggtggcggcggatctcaggtgcagctccagcagtccgatgccgagctggtgaagcccggaagcagcgtcaagatcagctgtaaggcctccggctacaccttcacagaccacgccatccactgggtgaagcagaagcccgagcagggcctggagtggatcggccactttagccccggaaacaccgacatcaagtacaacgacaagttcaagggcaaggccaccctgaccgtggacaggagcagcagcaccgcctacatgcagctgaacagcctgacaagcgaggacagcgccgtgtacttctgcaagacctccaccttcttcttcgactactggggccagggaaccaccctgacagtgtccagcaccacgacgccagcgccgcgaccaccaacaccggcgcccaccatcgcgtcgcagcccctgtccctgcgcccagaggcgtgccggccagcggcggggggcgcagtgcacacgagggggctggacttcgcctgtgatatctacatctgggcgcccttggccgggacttgtggggtccttctcctgtcactggttatcaccctttactgcaaacggggcagaaagaaactcctgtatatattcaaacaaccatttatgagaccagtacaaactactcaagaggaagatggctgtagctgccgatttccagaagaagaagaaggaggatgtgaactgagagtgaagttcagcaggagcgcagacgcccccgcgtacaagcagggccagaaccagctctataacgagctcaatctaggacgaagagaggagtacgatgttttggacaagaggcgtggccgggaccctgagatggggggaaagccgagaaggaagaaccctcaggaaggcctgtacaatgaactgcagaaagataagatggcggaggcctacagtgagattgggatgaaaggcgagcgccggaggggcaaggggcacgatggcctttaccagggtctcagtacagccaccaaggacacctacgacgcccttcacatgcaggccctgccccctcgctaa

SEQ ID NO: 62 - DNA, 3533 bp, Artificial Sequence
  Synthesized
atggccttaccagtgaccgccttgctcctgccgctggccttgctgctccacgccgccaggccggacatccagatgacacagactacatcctccctgtctgcctctctgggagacagagtcaccatcagttgcagggcaagtcaggacattagtaaatatttaaattggtatcagcagaaaccagatggaactgttaaactcctgatctaccatacatcaagattacactcaggagtcccatcaaggttcagtggcagtgggtctggaacagattattctctcaccattagcaacctggagcaagaagatattgccacttacttttgccaacagggtaatacgcttccgtacacgttcggaggggggaccaagctggagatcacaggtggcggtggctcgggcggtggtgggtcgggtggcggcggatctgaggtgaaactgcaggagtcaggacctggcctggtggcgccctcacagagcctgtccgtcacatgcactgtctcaggggtctcattacccgactatggtgtaagctggattcgccagcctccacgaaagggtctggagtggctgggagtaatatggggtagtgaaaccacatactataattcagctctcaaatccagactgaccatcatcaaggacaactccaagagccaagttttcttaaaaatgaacagtctgcaaactgatgacacagccatttactactgtgccaaacattattactacggtggtagctatgctatggactactggggccaaggaacctcagtcaccgtctcctcaaccacgacgccagcgccgcgaccaccaacaccggcgcccaccatcgcgtcgcagcccctgtccctgcgcccagaggcgtgccggccagcggcggggggcgcagtgcacacgagggggctggacttcgcctgtgatatctacatctgggcgcccttggccgggacttgtggggtccttctcctgtcactggttatcaccctttactgcaaacggggcagaaagaaactcctgtatatattcaaacaaccatttatgagaccagtacaaactactcaagaggaagatggctgtagctgccgatttccagaagaagaagaaggaggatgtgaactgagagtgaagttcagcaggagcgcagacgcccccgcgtacaagcagggccagaaccagctctataacgagctcaatctaggacgaagagaggagtacgatgttttggacaagaggcgtggccgggaccctgagatggggggaaagccgagaaggaagaaccctcaggaaggcctgtacaatgaactgcagaaagataagatggcggaggcctacagtgagattgggatgaaaggcgagcgccggaggggcaaggggcacgatggcctttaccagggtctcagtacagccaccaaggacacctacgacgcccttcacatgcaggccctgccccctcgctaatctagaggcgcgcccctctccctcccccccccctaacgttactggccgaagccgcttggaataaggccggtgtgcgtttgtctatatgttattttccaccatattgccgtcttttggcaatgtgagggcccggaaacctggccctgtcttcttgacgagcattcctaggggtctttcccctctcgccaaaggaatgcaaggtctgttgaatgtcgtgaaggaagcagttcctctggaagcttcttgaagacaaacaacgtctgtagcgaccctttgcaggcagcggaaccccccacctggcgacaggtgcctctgcggccaaaagccacgtgtataagatacacctgcaaaggcggcacaaccccagtgccacgttgtgagttggatagttgtggaaagagtcaaatggctctcctcaagcgtattcaacaaggggctgaaggatgcccagaaggtaccccattgtatgggatctgatctggggcctcggtacacatgctttacatgtgtttagtcgaggttaaaaaaacgtctaggccccccgaaccacggggacgtggttttcctttgaaaaacacgatgataatatggccacaacccatatgatggccttaccagtgaccgccttgctcctgccgctggccttgctgctccacgccgccaggccggacatcgtgatgacccagtccccctccagcctgacagtgacagccggcgagaaggtgacaatgatctgtaagtccagccagagcctgctgaacagcggcgaccagaagaactacctgacctggtaccagcagaagcctggccagccccccaagctgctgatcttctgggccagcacaagggagagcggcgtgcccgacagattcacaggcagcggcagcggcaccgacttcacactgaccatttcctccgtgcaggccgaggacctcgccgtgtactactgccagaacgactactcctaccccctgacattcggcgccggcaccaaactggagctgaagggtggcggtggctcgggcggtggtgggtcgggtggcggcggatctcaggtgcagctccagcagtccgatgccgagctggtgaagcccggaagcagcgtcaagatcagctgtaaggcctccggctacaccttcacagaccacgccatccactgggtgaagcagaagcccgagcagggcctggagtggatcggccactttagccccggaaacaccgacatcaagtacaacgacaagttcaagggcaaggccaccctgaccgtggacaggagcagcagcaccgcctacatgcagctgaacagcctgacaagcgaggacagcgccgtgtacttctgcaagacctccaccttcttcttcgactactggggccagggaaccaccctgacagtgtccagcaccacgacgccagcgccgcgaccaccaacaccggcgcccaccatcgcgtcgcagcccctgtccctgcgcccagaggcgtgccggccagcggcggggggcgcagtgcacacgagggggctggacttcgcctgtgatatctacatctgggcgcccttggccgggacttgtggggtccttctcctgtcactggttatcaccctttactgcaaacggggcagaaagaaactcctgtatatattcaaacaaccatttatgagaccagtacaaactactcaagaggaagatggctgtagctgccgatttccagaagaagaagaaggaggatgtgaactgagagtgaagttcagcaggagcgcagacgcccccgcgtacaagcagggccagaaccagctctataacgagctcaatctaggacgaagagaggagtacgatgttttggacaagaggcgtggccgggaccctgagatggggggaaagccgagaaggaagaaccctcaggaaggcctgtacaatgaactgcagaaagataagatggcggaggcctacagtgagattgggatgaaaggcgagcgccggaggggcaaggggcacgatggcctttaccagggtctcagtacagccaccaaggacacctacgacgcccttcacatgcaggccctgccccctcgctaa

SEQ ID NO: 63 - DNA, 3533 bp, Artificial Sequence
  Synthesized
atggccttaccagtgaccgccttgctcctgccgctggccttgctgctccacgccgccaggccggatatccagatgacccagagcccgagcagcctgagcgcgagcgtgggtgatcgcgtgaccattacctgcagggcaagtcaggacattagtaaatatttaaattggtatcagcagaaaccgggtaaagcgccgaaactgttaatttatcatacatcaagattacactcaggcgtgccgtcgcgttttagcggctcgggttcgggcaccgattttaccctgaccatctcgagcttgcagccggaggacttcgccacctactattgccaacagggtaatacgcttccgtacacgttcggtcagggcaccaaagtggagatcaaaggtggcggtggctcgggcggtggtgggtcgggtggcggcggatctgaggtgcagctggtggagtctgggggaggcttggtacagcctggggggtccctgagactctcctgtgcagcctctggagtgtccctgcctgattatggcgtgtcctgggtccgccaggctccagggaaggggctggagtgggtttcagtgatctggggcagcgagacaacctactacaacagcgccctgaagtcccgattcaccatctccagagacaatgccaagaactcactgtatctgcaaatgaacagcctgagagccgaggacacggctgtgtattactgtgcgaagcactactactacggcggcagctacgctatggactactggggccaaggaaccctggtcaccgtgtcctcaaccacgacgccagcgccgcgaccaccaacaccggcgcccaccatcgcgtcgcagcccctgtccctgcgcccagaggcgtgccggccagcggcggggggcgcagtgcacacgagggggctggacttcgcctgtgatatctacatctgggcgcccttggccgggacttgtggggtccttctcctgtcactggttatcaccctttactgcaaacggggcagaaagaaactcctgtatatattcaaacaaccatttatgagaccagtacaaactactcaagaggaagatggctgtagctgccgatttccagaagaagaagaaggaggatgtgaactgagagtgaagttcagcaggagcgcagacgcccccgcgtacaagcagggccagaaccagctctataacgagctcaatctaggacgaagagaggagtacgatgttttggacaagaggcgtggccgggaccctgagatggggggaaagccgagaaggaagaaccctcaggaaggcctgtacaatgaactgcagaaagataagatggcggaggcctacagtgagattgggatgaaaggcgagcgccggaggggcaaggggcacgatggcctttaccagggtctcagtacagccaccaaggacacctacgacgcccttcacatgcaggccctgccccctcgctaatctagaggcgcgcccctctccctcccccccccctaacgttactggccgaagccgcttggaataaggccggtgtgcgtttgtctatatgttattttccaccatattgccgtcttttggcaatgtgagggcccggaaacctggccctgtcttcttgacgagcattcctaggggtctttcccctctcgccaaaggaatgcaaggtctgttgaatgtcgtgaaggaagcagttcctctggaagcttcttgaagacaaacaacgtctgtagcgaccctttgcaggcagcggaaccccccacctggcgacaggtgcctctgcggccaaaagccacgtgtataagatacacctgcaaaggcggcacaaccccagtgccacgttgtgagttggatagttgtggaaagagtcaaatggctctcctcaagcgtattcaacaaggggctgaaggatgcccagaaggtaccccattgtatgggatctgatctggggcctcggtacacatgctttacatgtgtttagtcgaggttaaaaaaacgtctaggccccccgaaccacggggacgtggttttcctttgaaaaacacgatgataatatggccacaacccatatgatggccttaccagtgaccgccttgctcctgccgctggccttgctgctccacgccgccaggccggacatcgtgatgacccagtccccctccagcctgacagtgacagccggcgagaaggtgacaatgatctgtaagtccagccagagcctgctgaacagcggcgaccagaagaactacctgacctggtaccagcagaagcctggccagccccccaagctgctgatcttctgggccagcacaagggagagcggcgtgcccgacagattcacaggcagcggcagcggcaccgacttcacactgaccatttcctccgtgcaggccgaggacctcgccgtgtactactgccagaacgactactcctaccccctgacattcggcgccggcaccaaactggagctgaagggtggcggtggctcgggcggtggtgggtcgggtggcggcggatctcaggtgcagctccagcagtccgatgccgagctggtgaagcccggaagcagcgtcaagatcagctgtaaggcctccggctacaccttcacagaccacgccatccactgggtgaagcagaagcccgagcagggcctggagtggatcggccactttagccccggaaacaccgacatcaagtacaacgacaagttcaagggcaaggccaccctgaccgtggacaggagcagcagcaccgcctacatgcagctgaacagcctgacaagcgaggacagcgccgtgtacttctgcaagacctccaccttcttcttcgactactggggccagggaaccaccctgacagtgtccagcaccacgacgccagcgccgcgaccaccaacaccggcgcccaccatcgcgtcgcagcccctgtccctgcgcccagaggcgtgccggccagcggcggggggcgcagtgcacacgagggggctggacttcgcctgtgatatctacatctgggcgcccttggccgggacttgtggggtccttctcctgtcactggttatcaccctttactgcaaacggggcagaaagaaactcctgtatatattcaaacaaccatttatgagaccagtacaaactactcaagaggaagatggctgtagctgccgatttccagaagaagaagaaggaggatgtgaactgagagtgaagttcagcaggagcgcagacgcccccgcgtacaagcagggccagaaccagctctataacgagctcaatctaggacgaagagaggagtacgatgttttggacaagaggcgtggccgggaccctgagatggggggaaagccgagaaggaagaaccctcaggaaggcctgtacaatgaactgcagaaagataagatggcggaggcctacagtgagattgggatgaaaggcgagcgccggaggggcaaggggcacgatggcctttaccagggtctcagtacagccaccaaggacacctacgacgcccttcacatgcaggccctgccccctcgctaa

SEQ ID NO: 64 - DNA, 3545 bp, Artificial Sequence
  Synthesized
atggccttaccagtgaccgccttgctcctgccgctggccttgctgctccacgccgccaggccggatatccagatgacccagagcccaagctccctgtccgcctctgtgggcgacagggtgaccatcacatgccgcgccagccagacaatctggtcctacctgaactggtatcagcagagacccggcaaggcccctaatctgctgatctacgcagcatctagcctgcagtctggagtgccctcccggttctctggaagaggatccggaaccgacttcaccctgacaatctcctctctgcaggccgaggacttcgccacatactattgccagcagagctattccatccctcagacctttggccagggcacaaagctggagatcaagggcggcggcggctctggaggaggaggaagcggaggaggaggatcccaggtgcagctgcagcagagcggaccaggactggtgaagccctcccagaccctgtctctgacatgtgccatcagcggcgattccgtgagctccaacagcgccgcctggaattggatccggcagtctcccagcagaggactggagtggctgggaaggacctactatcgctccaagtggtacaacgattatgccgtgtctgtgaagagccggatcaccatcaaccctgacacatctaagaatcagttcagcctgcagctgaattccgtgaccccagaggacacagccgtgtactattgtgcaagggaggtgaccggcgacctggaggatgcctttgacatctggggccagggcaccatggtgacagtgtctagcaccacgacgccagcgccgcgaccaccaacaccggcgcccaccatcgcgtcgcagcccctgtccctgcgcccagaggcgtgccggccagcggcggggggcgcagtgcacacgagggggctggacttcgcctgtgatatctacatctgggcgcccttggccgggacttgtggggtccttctcctgtcactggttatcaccctttactgcaaacggggcagaaagaaactcctgtatatattcaaacaaccatttatgagaccagtacaaactactcaagaggaagatggctgtagctgccgatttccagaagaagaagaaggaggatgtgaactgagagtgaagttcagcaggagcgcagacgcccccgcgtacaagcagggccagaaccagctctataacgagctcaatctaggacgaagagaggagtacgatgttttggacaagaggcgtggccgggaccctgagatggggggaaagccgagaaggaagaaccctcaggaaggcctgtacaatgaactgcagaaagataagatggcggaggcctacagtgagattgggatgaaaggcgagcgccggaggggcaaggggcacgatggcctttaccagggtctcagtacagccaccaaggacacctacgacgcccttcacatgcaggccctgccccctcgctaatctagaggcgcgcccctctccctcccccccccctaacgttactggccgaagccgcttggaataaggccggtgtgcgtttgtctatatgttattttccaccatattgccgtcttttggcaatgtgagggcccggaaacctggccctgtcttcttgacgagcattcctaggggtctttcccctctcgccaaaggaatgcaaggtctgttgaatgtcgtgaaggaagcagttcctctggaagcttcttgaagacaaacaacgtctgtagcgaccctttgcaggcagcggaaccccccacctggcgacaggtgcctctgcggccaaaagccacgtgtataagatacacctgcaaaggcggcacaaccccagtgccacgttgtgagttggatagttgtggaaagagtcaaatggctctcctcaagcgtattcaacaaggggctgaaggatgcccagaaggtaccccattgtatgggatctgatctggggcctcggtacacatgctttacatgtgtttagtcgaggttaaaaaaacgtctaggccccccgaaccacggggacgtggttttcctttgaaaaacacgatgataatatggccacaacccatatgatggccttaccagtgaccgccttgctcctgccgctggccttgctgctccacgccgccaggccggacatcgtgatgacccagtccccctccagcctgacagtgacagccggcgagaaggtgacaatgatctgtaagtccagccagagcctgctgaacagcggcgaccagaagaactacctgacctggtaccagcagaagcctggccagccccccaagctgctgatcttctgggccagcacaagggagagcggcgtgcccgacagattcacaggcagcggcagcggcaccgacttcacactgaccatttcctccgtgcaggccgaggacctcgccgtgtactactgccagaacgactactcctaccccctgacattcggcgccggcaccaaactggagctgaagggtggcggtggctcgggcggtggtgggtcgggtggcggcggatctcaggtgcagctccagcagtccgatgccgagctggtgaagcccggaagcagcgtcaagatcagctgtaaggcctccggctacaccttcacagaccacgccatccactgggtgaagcagaagcccgagcagggcctggagtggatcggccactttagccccggaaacaccgacatcaagtacaacgacaagttcaagggcaaggccaccctgaccgtggacaggagcagcagcaccgcctacatgcagctgaacagcctgacaagcgaggacagcgccgtgtacttctgcaagacctccaccttcttcttcgactactggggccagggaaccaccctgacagtgtccagcaccacgacgccagcgccgcgaccaccaacaccggcgcccaccatcgcgtcgcagcccctgtccctgcgcccagaggcgtgccggccagcggcggggggcgcagtgcacacgagggggctggacttcgcctgtgatatctacatctgggcgcccttggccgggacttgtggggtccttctcctgtcactggttatcaccctttactgcaaacggggcagaaagaaactcctgtatatattcaaacaaccatttatgagaccagtacaaactactcaagaggaagatggctgtagctgccgatttccagaagaagaagaaggaggatgtgaactgagagtgaagttcagcaggagcgcagacgcccccgcgtacaagcagggccagaaccagctctataacgagctcaatctaggacgaagagaggagtacgatgttttggacaagaggcgtggccgggaccctgagatggggggaaagccgagaaggaagaaccctcaggaaggcctgtacaatgaactgcagaaagataagatggcggaggcctacagtgagattgggatgaaaggcgagcgccggaggggcaaggggcacgatggcctttaccagggtctcagtacagccaccaaggacacctacgacgcccttcacatgcaggccctgccccctcgctaa

SEQ ID NO: 65 - DNA, 3518 bp, Artificial Sequence
  Synthesized
atggccttaccagtgaccgccttgctcctgccgctggccttgctgctccacgccgccaggccggacatccagctcacccagtccccgagctcgctgtccgcctccgtgggagatcgggtcaccatcacgtgccgcgccagccagtcgatttcctcctacctgaactggtaccaacagaagcccggaaaagccccgaagcttctcatctacgccgcctcgagcctgcagtcaggagtgccctcacggttctccggctccggttccggtactgatttcaccctgaccatttcctccctgcaaccggaggacttcgctacttactactgccagcagtcgtactccaccccctacactttcggacaaggcaccaaggtcgaaatcaagggtggcggtggctcgggcggtggtgggtcgggtggcggcggatctgaagtgcaattggtggaatcagggggaggacttgtgcagcctggaggatcgctgagactgtcatgtgccgtgtccggctttgccctgtccaaccacgggatgtcctgggtccgccgcgcgcctggaaagggcctcgaatgggtgtcgggtattgtgtacagcggtagcacctactatgccgcatccgtgaaggggagattcaccatcagccgggacaactccaggaacactctgtacctccaaatgaattcgctgaggccagaggacactgccatctactactgctccgcgcatggcggagagtccgacgtctggggacaggggaccaccgtgaccgtgtctagcaccacgacgccagcgccgcgaccaccaacaccggcgcccaccatcgcgtcgcagcccctgtccctgcgcccagaggcgtgccggccagcggcggggggcgcagtgcacacgagggggctggacttcgcctgtgatatctacatctgggcgcccttggccgggacttgtggggtccttctcctgtcactggttatcaccctttactgcaaacggggcagaaagaaactcctgtatatattcaaacaaccatttatgagaccagtacaaactactcaagaggaagatggctgtagctgccgatttccagaagaagaagaaggaggatgtgaactgagagtgaagttcagcaggagcgcagacgcccccgcgtacaagcagggccagaaccagctctataacgagctcaatctaggacgaagagaggagtacgatgttttggacaagaggcgtggccgggaccctgagatggggggaaagccgagaaggaagaaccctcaggaaggcctgtacaatgaactgcagaaagataagatggcggaggcctacagtgagattgggatgaaaggcgagcgccggaggggcaaggggcacgatggcctttaccagggtctcagtacagccaccaaggacacctacgacgcccttcacatgcaggccctgccccctcgctaatctagaggcgcgcccctctccctcccccccccctaacgttactggccgaagccgcttggaataaggccggtgtgcgtttgtctatatgttattttccaccatattgccgtcttttggcaatgtgagggcccggaaacctggccctgtcttcttgacgagcattcctaggggtctttcccctctcgccaaaggaatgcaaggtctgttgaatgtcgtgaaggaagcagttcctctggaagcttcttgaagacaaacaacgtctgtagcgaccctttgcaggcagcggaaccccccacctggcgacaggtgcctctgcggccaaaagccacgtgtataagatacacctgcaaaggcggcacaaccccagtgccacgttgtgagttggatagttgtggaaagagtcaaatggctctcctcaagcgtattcaacaaggggctgaaggatgcccagaaggtaccccattgtatgggatctgatctggggcctcggtacacatgctttacatgtgtttagtcgaggttaaaaaaacgtctaggccccccgaaccacggggacgtggttttcctttgaaaaacacgatgataatatggccacaacccatatgatggccttaccagtgaccgccttgctcctgccgctggccttgctgctccacgccgccaggccggacatcgtgatgacccagtccccctccagcctgacagtgacagccggcgagaaggtgacaatgatctgtaagtccagccagagcctgctgaacagcggcgaccagaagaactacctgacctggtaccagcagaagcctggccagccccccaagctgctgatcttctgggccagcacaagggagagcggcgtgcccgacagattcacaggcagcggcagcggcaccgacttcacactgaccatttcctccgtgcaggccgaggacctcgccgtgtactactgccagaacgactactcctaccccctgacattcggcgccggcaccaaactggagctgaagggtggcggtggctcgggcggtggtgggtcgggtggcggcggatctcaggtgcagctccagcagtccgatgccgagctggtgaagcccggaagcagcgtcaagatcagctgtaaggcctccggctacaccttcacagaccacgccatccactgggtgaagcagaagcccgagcagggcctggagtggatcggccactttagccccggaaacaccgacatcaagtacaacgacaagttcaagggcaaggccaccctgaccgtggacaggagcagcagcaccgcctacatgcagctgaacagcctgacaagcgaggacagcgccgtgtacttctgcaagacctccaccttcttcttcgactactggggccagggaaccaccctgacagtgtccagcaccacgacgccagcgccgcgaccaccaacaccggcgcccaccatcgcgtcgcagcccctgtccctgcgcccagaggcgtgccggccagcggcggggggcgcagtgcacacgagggggctggacttcgcctgtgatatctacatctgggcgcccttggccgggacttgtggggtccttctcctgtcactggttatcaccctttactgcaaacggggcagaaagaaactcctgtatatattcaaacaaccatttatgagaccagtacaaactactcaagaggaagatggctgtagctgccgatttccagaagaagaagaaggaggatgtgaactgagagtgaagttcagcaggagcgcagacgcccccgcgtacaagcagggccagaaccagctctataacgagctcaatctaggacgaagagaggagtacgatgttttggacaagaggcgtggccgggaccctgagatggggggaaagccgagaaggaagaaccctcaggaaggcctgtacaatgaactgcagaaagataagatggcggaggcctacagtgagattgggatgaaaggcgagcgccggaggggcaaggggcacgatggcctttaccagggtctcagtacagccaccaaggacacctacgacgcccttcacatgcaggccctgccccctcgctaa

SEQ ID NO: 66 - DNA, 2994 bp, Artificial Sequence
  Synthesized
atggccttaccagtgaccgccttgctcctgccgctggccttgctgctccacgccgccaggccggacatccagatgacacagactacatcctccctgtctgcctctctgggagacagagtcaccatcagttgcagggcaagtcaggacattagtaaatatttaaattggtatcagcagaaaccagatggaactgttaaactcctgatctaccatacatcaagattacactcaggagtcccatcaaggttcagtggcagtgggtctggaacagattattctctcaccattagcaacctggagcaagaagatattgccacttacttttgccaacagggtaatacgcttccgtacacgttcggaggggggaccaagctggagatcacaggtggcggtggctcgggcggtggtgggtcgggtggcggcggatctgaggtgaaactgcaggagtcaggacctggcctggtggcgccctcacagagcctgtccgtcacatgcactgtctcaggggtctcattacccgactatggtgtaagctggattcgccagcctccacgaaagggtctggagtggctgggagtaatatggggtagtgaaaccacatactataattcagctctcaaatccagactgaccatcatcaaggacaactccaagagccaagttttcttaaaaatgaacagtctgcaaactgatgacacagccatttactactgtgccaaacattattactacggtggtagctatgctatggactactggggccaaggaacctcagtcaccgtctcctcaaccacgacgccagcgccgcgaccaccaacaccggcgcccaccatcgcgtcgcagcccctgtccctgcgcccagaggcgtgccggccagcggcggggggcgcagtgcacacgagggggctggacttcgcctgtgatatctacatctgggcgcccttggccgggacttgtggggtccttctcctgtcactggttatcaccctttactgcaaacggggcagaaagaaactcctgtatatattcaaacaaccatttatgagaccagtacaaactactcaagaggaagatggctgtagctgccgatttccagaagaagaagaaggaggatgtgaactgagagtgaagttcagcaggagcgcagacgcccccgcgtacaagcagggccagaaccagctctataacgagctcaatctaggacgaagagaggagtacgatgttttggacaagaggcgtggccgggaccctgagatggggggaaagccgagaaggaagaaccctcaggaaggcctgtacaatgaactgcagaaagataagatggcggaggcctacagtgagattgggatgaaaggcgagcgccggaggggcaaggggcacgatggcctttaccagggtctcagtacagccaccaaggacacctacgacgcccttcacatgcaggccctgccccctcgctctagagccacgaacttctctctgttaaagcaagcaggagacgtggaagaaaaccccggtcctcatatgatggccttaccagtgaccgccttgctcctgccgctggccttgctgctccacgccgccaggccggacatcgtgatgacccagtccccctccagcctgacagtgacagccggcgagaaggtgacaatgatctgtaagtccagccagagcctgctgaacagcggcgaccagaagaactacctgacctggtaccagcagaagcctggccagccccccaagctgctgatcttctgggccagcacaagggagagcggcgtgcccgacagattcacaggcagcggcagcggcaccgacttcacactgaccatttcctccgtgcaggccgaggacctcgccgtgtactactgccagaacgactactcctaccccctgacattcggcgccggcaccaaactggagctgaagggtggcggtggctcgggcggtggtgggtcgggtggcggcggatctcaggtgcagctccagcagtccgatgccgagctggtgaagcccggaagcagcgtcaagatcagctgtaaggcctccggctacaccttcacagaccacgccatccactgggtgaagcagaagcccgagcagggcctggagtggatcggccactttagccccggaaacaccgacatcaagtacaacgacaagttcaagggcaaggccaccctgaccgtggacaggagcagcagcaccgcctacatgcagctgaacagcctgacaagcgaggacagcgccgtgtacttctgcaagacctccaccttcttcttcgactactggggccagggaaccaccctgacagtgtccagcaccacgacgccagcgccgcgaccaccaacaccggcgcccaccatcgcgtcgcagcccctgtccctgcgcccagaggcgtgccggccagcggcggggggcgcagtgcacacgagggggctggacttcgcctgtgatatctacatctgggcgcccttggccgggacttgtggggtccttctcctgtcactggttatcaccctttactgcaaacggggcagaaagaaactcctgtatatattcaaacaaccatttatgagaccagtacaaactactcaagaggaagatggctgtagctgccgatttccagaagaagaagaaggaggatgtgaactgagagtgaagttcagcaggagcgcagacgcccccgcgtacaagcagggccagaaccagctctataacgagctcaatctaggacgaagagaggagtacgatgttttggacaagaggcgtggccgggaccctgagatggggggaaagccgagaaggaagaaccctcaggaaggcctgtacaatgaactgcagaaagataagatggcggaggcctacagtgagattgggatgaaaggcgagcgccggaggggcaaggggcacgatggcctttaccagggtctcagtacagccaccaaggacacctacgacgcccttcacatgcaggccctgccccctcgctaa

SEQ ID NO: 67 - DNA, 2994 bp, Artificial Sequence
  Synthesized
atggccttaccagtgaccgccttgctcctgccgctggccttgctgctccacgccgccaggccggatatccagatgacccagagcccgagcagcctgagcgcgagcgtgggtgatcgcgtgaccattacctgcagggcaagtcaggacattagtaaatatttaaattggtatcagcagaaaccgggtaaagcgccgaaactgttaatttatcatacatcaagattacactcaggcgtgccgtcgcgttttagcggctcgggttcgggcaccgattttaccctgaccatctcgagcttgcagccggaggacttcgccacctactattgccaacagggtaatacgcttccgtacacgttcggtcagggcaccaaagtggagatcaaaggtggcggtggctcgggcggtggtgggtcgggtggcggcggatctgaggtgcagctggtggagtctgggggaggcttggtacagcctggggggtccctgagactctcctgtgcagcctctggagtgtccctgcctgattatggcgtgtcctgggtccgccaggctccagggaaggggctggagtgggtttcagtgatctggggcagcgagacaacctactacaacagcgccctgaagtcccgattcaccatctccagagacaatgccaagaactcactgtatctgcaaatgaacagcctgagagccgaggacacggctgtgtattactgtgcgaagcactactactacggcggcagctacgctatggactactggggccaaggaaccctggtcaccgtgtcctcaaccacgacgccagcgccgcgaccaccaacaccggcgcccaccatcgcgtcgcagcccctgtccctgcgcccagaggcgtgccggccagcggcggggggcgcagtgcacacgagggggctggacttcgcctgtgatatctacatctgggcgcccttggccgggacttgtggggtccttctcctgtcactggttatcaccctttactgcaaacggggcagaaagaaactcctgtatatattcaaacaaccatttatgagaccagtacaaactactcaagaggaagatggctgtagctgccgatttccagaagaagaagaaggaggatgtgaactgagagtgaagttcagcaggagcgcagacgcccccgcgtacaagcagggccagaaccagctctataacgagctcaatctaggacgaagagaggagtacgatgttttggacaagaggcgtggccgggaccctgagatggggggaaagccgagaaggaagaaccctcaggaaggcctgtacaatgaactgcagaaagataagatggcggaggcctacagtgagattgggatgaaaggcgagcgccggaggggcaaggggcacgatggcctttaccagggtctcagtacagccaccaaggacacctacgacgcccttcacatgcaggccctgccccctcgctctagagccacgaacttctctctgttaaagcaagcaggagacgtggaagaaaaccccggtcctcatatgatggccttaccagtgaccgccttgctcctgccgctggccttgctgctccacgccgccaggccggacatcgtgatgacccagtccccctccagcctgacagtgacagccggcgagaaggtgacaatgatctgtaagtccagccagagcctgctgaacagcggcgaccagaagaactacctgacctggtaccagcagaagcctggccagccccccaagctgctgatcttctgggccagcacaagggagagcggcgtgcccgacagattcacaggcagcggcagcggcaccgacttcacactgaccatttcctccgtgcaggccgaggacctcgccgtgtactactgccagaacgactactcctaccccctgacattcggcgccggcaccaaactggagctgaagggtggcggtggctcgggcggtggtgggtcgggtggcggcggatctcaggtgcagctccagcagtccgatgccgagctggtgaagcccggaagcagcgtcaagatcagctgtaaggcctccggctacaccttcacagaccacgccatccactgggtgaagcagaagcccgagcagggcctggagtggatcggccactttagccccggaaacaccgacatcaagtacaacgacaagttcaagggcaaggccaccctgaccgtggacaggagcagcagcaccgcctacatgcagctgaacagcctgacaagcgaggacagcgccgtgtacttctgcaagacctccaccttcttcttcgactactggggccagggaaccaccctgacagtgtccagcaccacgacgccagcgccgcgaccaccaacaccggcgcccaccatcgcgtcgcagcccctgtccctgcgcccagaggcgtgccggccagcggcggggggcgcagtgcacacgagggggctggacttcgcctgtgatatctacatctgggcgcccttggccgggacttgtggggtccttctcctgtcactggttatcaccctttactgcaaacggggcagaaagaaactcctgtatatattcaaacaaccatttatgagaccagtacaaactactcaagaggaagatggctgtagctgccgatttccagaagaagaagaaggaggatgtgaactgagagtgaagttcagcaggagcgcagacgcccccgcgtacaagcagggccagaaccagctctataacgagctcaatctaggacgaagagaggagtacgatgttttggacaagaggcgtggccgggaccctgagatggggggaaagccgagaaggaagaaccctcaggaaggcctgtacaatgaactgcagaaagataagatggcggaggcctacagtgagattgggatgaaaggcgagcgccggaggggcaaggggcacgatggcctttaccagggtctcagtacagccaccaaggacacctacgacgcccttcacatgcaggccctgccccctcgctaa

SEQ ID NO: 68 - DNA, 3009 bp, Artificial Sequence
  Synthesized
atggccttaccagtgaccgccttgctcctgccgctggccttgctgctccacgccgccaggccggatatccagatgacccagagcccaagctccctgtccgcctctgtgggcgacagggtgaccatcacatgccgcgccagccagacaatctggtcctacctgaactggtatcagcagagacccggcaaggcccctaatctgctgatctacgcagcatctagcctgcagtctggagtgccctcccggttctctggaagaggatccggaaccgacttcaccctgacaatctcctctctgcaggccgaggacttcgccacatactattgccagcagagctattccatccctcagacctttggccagggcacaaagctggagatcaagggcggcggcggctctggaggaggaggaagcggaggaggaggatcccaggtgcagctgcagcagagcggaccaggactggtgaagccctcccagaccctgtctctgacatgtgccatcagcggcgattccgtgagctccaacagcgccgcctggaattggatccggcagtctcccagcagaggactggagtggctgggaaggacctactatcgctccaagtggtacaacgattatgccgtgtctgtgaagagccggatcaccatcaaccctgacacatctaagaatcagttcagcctgcagctgaattccgtgaccccagaggacacagccgtgtactattgtgcaagggaggtgaccggcgacctggaggatgcctttgacatctggggccagggcaccatggtgacagtgtctagcaccacgacgccagcgccgcgaccaccaacaccggcgcccaccatcgcgtcgcagcccctgtccctgcgcccagaggcgtgccggccagcggcggggggcgcagtgcacacgagggggctggacttcgcctgtgatatctacatctgggcgcccttggccgggacttgtggggtccttctcctgtcactggttatcaccctttactgcaaacggggcagaaagaaactcctgtatatattcaaacaaccatttatgagaccagtacaaactactcaagaggaagatggctgtagctgccgatttccagaagaagaagaaggaggatgtgaactgagagtgaagttcagcaggagcgcagacgcccccgcgtacaagcagggccagaaccagctctataacgagctcaatctaggacgaagagaggagtacgatgttttggacaagaggcgtggccgggaccctgagatggggggaaagccgagaaggaagaaccctcaggaaggcctgtacaatgaactgcagaaagataagatggcggaggcctacagtgagattgggatgaaaggcgagcgccggaggggcaaggggcacgatggcctttaccagggtctcagtacagccaccaaggacacctacgacgcccttcacatgcaggccctgccccctcgctaatctagagccacgaacttctctctgttaaagcaagcaggagacgtggaagaaaaccccggtcctcatatgatggccttaccagtgaccgccttgctcctgccgctggccttgctgctccacgccgccaggccggacatcgtgatgacccagtccccctccagcctgacagtgacagccggcgagaaggtgacaatgatctgtaagtccagccagagcctgctgaacagcggcgaccagaagaactacctgacctggtaccagcagaagcctggccagccccccaagctgctgatcttctgggccagcacaagggagagcggcgtgcccgacagattcacaggcagcggcagcggcaccgacttcacactgaccatttcctccgtgcaggccgaggacctcgccgtgtactactgccagaacgactactcctaccccctgacattcggcgccggcaccaaactggagctgaagggtggcggtggctcgggcggtggtgggtcgggtggcggcggatctcaggtgcagctccagcagtccgatgccgagctggtgaagcccggaagcagcgtcaagatcagctgtaaggcctccggctacaccttcacagaccacgccatccactgggtgaagcagaagcccgagcagggcctggagtggatcggccactttagccccggaaacaccgacatcaagtacaacgacaagttcaagggcaaggccaccctgaccgtggacaggagcagcagcaccgcctacatgcagctgaacagcctgacaagcgaggacagcgccgtgtacttctgcaagacctccaccttcttcttcgactactggggccagggaaccaccctgacagtgtccagcaccacgacgccagcgccgcgaccaccaacaccggcgcccaccatcgcgtcgcagcccctgtccctgcgcccagaggcgtgccggccagcggcggggggcgcagtgcacacgagggggctggacttcgcctgtgatatctacatctgggcgcccttggccgggacttgtggggtccttctcctgtcactggttatcaccctttactgcaaacggggcagaaagaaactcctgtatatattcaaacaaccatttatgagaccagtacaaactactcaagaggaagatggctgtagctgccgatttccagaagaagaagaaggaggatgtgaactgagagtgaagttcagcaggagcgcagacgcccccgcgtacaagcagggccagaaccagctctataacgagctcaatctaggacgaagagaggagtacgatgttttggacaagaggcgtggccgggaccctgagatggggggaaagccgagaaggaagaaccctcaggaaggcctgtacaatgaactgcagaaagataagatggcggaggcctacagtgagattgggatgaaaggcgagcgccggaggggcaaggggcacgatggcctttaccagggtctcagtacagccaccaaggacacctacgacgcccttcacatgcaggccctgccccctcgctaa

SEQ ID NO: 69 - DNA, 2982 bp, Artificial Sequence
  Synthesized
atggccttaccagtgaccgccttgctcctgccgctggccttgctgctccacgccgccaggccggacatccagctcacccagtccccgagctcgctgtccgcctccgtgggagatcgggtcaccatcacgtgccgcgccagccagtcgatttcctcctacctgaactggtaccaacagaagcccggaaaagccccgaagcttctcatctacgccgcctcgagcctgcagtcaggagtgccctcacggttctccggctccggttccggtactgatttcaccctgaccatttcctccctgcaaccggaggacttcgctacttactactgccagcagtcgtactccaccccctacactttcggacaaggcaccaaggtcgaaatcaagggtggcggtggctcgggcggtggtgggtcgggtggcggcggatctgaagtgcaattggtggaatcagggggaggacttgtgcagcctggaggatcgctgagactgtcatgtgccgtgtccggctttgccctgtccaaccacgggatgtcctgggtccgccgcgcgcctggaaagggcctcgaatgggtgtcgggtattgtgtacagcggtagcacctactatgccgcatccgtgaaggggagattcaccatcagccgggacaactccaggaacactctgtacctccaaatgaattcgctgaggccagaggacactgccatctactactgctccgcgcatggcggagagtccgacgtctggggacaggggaccaccgtgaccgtgtctagcaccacgacgccagcgccgcgaccaccaacaccggcgcccaccatcgcgtcgcagcccctgtccctgcgcccagaggcgtgccggccagcggcggggggcgcagtgcacacgagggggctggacttcgcctgtgatatctacatctgggcgcccttggccgggacttgtggggtccttctcctgtcactggttatcaccctttactgcaaacggggcagaaagaaactcctgtatatattcaaacaaccatttatgagaccagtacaaactactcaagaggaagatggctgtagctgccgatttccagaagaagaagaaggaggatgtgaactgagagtgaagttcagcaggagcgcagacgcccccgcgtacaagcagggccagaaccagctctataacgagctcaatctaggacgaagagaggagtacgatgttttggacaagaggcgtggccgggaccctgagatggggggaaagccgagaaggaagaaccctcaggaaggcctgtacaatgaactgcagaaagataagatggcggaggcctacagtgagattgggatgaaaggcgagcgccggaggggcaaggggcacgatggcctttaccagggtctcagtacagccaccaaggacacctacgacgcccttcacatgcaggccctgccccctcgctaatctagagccacgaacttctctctgttaaagcaagcaggagacgtggaagaaaaccccggtcctcatatgatggccttaccagtgaccgccttgctcctgccgctggccttgctgctccacgccgccaggccggacatcgtgatgacccagtccccctccagcctgacagtgacagccggcgagaaggtgacaatgatctgtaagtccagccagagcctgctgaacagcggcgaccagaagaactacctgacctggtaccagcagaagcctggccagccccccaagctgctgatcttctgggccagcacaagggagagcggcgtgcccgacagattcacaggcagcggcagcggcaccgacttcacactgaccatttcctccgtgcaggccgaggacctcgccgtgtactactgccagaacgactactcctaccccctgacattcggcgccggcaccaaactggagctgaagggtggcggtggctcgggcggtggtgggtcgggtggcggcggatctcaggtgcagctccagcagtccgatgccgagctggtgaagcccggaagcagcgtcaagatcagctgtaaggcctccggctacaccttcacagaccacgccatccactgggtgaagcagaagcccgagcagggcctggagtggatcggccactttagccccggaaacaccgacatcaagtacaacgacaagttcaagggcaaggccaccctgaccgtggacaggagcagcagcaccgcctacatgcagctgaacagcctgacaagcgaggacagcgccgtgtacttctgcaagacctccaccttcttcttcgactactggggccagggaaccaccctgacagtgtccagcaccacgacgccagcgccgcgaccaccaacaccggcgcccaccatcgcgtcgcagcccctgtccctgcgcccagaggcgtgccggccagcggcggggggcgcagtgcacacgagggggctggacttcgcctgtgatatctacatctgggcgcccttggccgggacttgtggggtccttctcctgtcactggttatcaccctttactgcaaacggggcagaaagaaactcctgtatatattcaaacaaccatttatgagaccagtacaaactactcaagaggaagatggctgtagctgccgatttccagaagaagaagaaggaggatgtgaactgagagtgaagttcagcaggagcgcagacgcccccgcgtacaagcagggccagaaccagctctataacgagctcaatctaggacgaagagaggagtacgatgttttggacaagaggcgtggccgggaccctgagatggggggaaagccgagaaggaagaaccctcaggaaggcctgtacaatgaactgcagaaagataagatggcggaggcctacagtgagattgggatgaaaggcgagcgccggaggggcaaggggcacgatggcctttaccagggtctcagtacagccaccaaggacacctacgacgcccttcacatgcaggccctgccccctcgctaa

SEQ ID NO: 70 - protein, 244 aa, Artificial Sequence
  Synthesized
DIVMTQSPSSLTVTAGEKVTMICKSSQSLLNSGDQKNYLTWYQQKPGQPPKLLIFWASTRESGVPDRFTGSGSGTDFTLTISSVQAEDLAVYYCQNDYSYPLTFGAGTKLELKGGGGSGGGGSGGGGSQVQLQQSDAELVKPGSSVKISCKASGYTFTDHAIHWVKQKPEQGLEWIGHFSPGNTDIKYNDKFKGKATLTVDRSSSTAYMQLNSLTSEDSAVYFCKTSTFFFDYWGQGTTLTVSS

SEQ ID NO: 71 - protein, 116 aa, Artificial Sequence
  Synthesized
QVQLQQSDAELVKPGSSVKISCKASGYTFTDHAIHWVKQKPEQGLEWIGHFSPGNTDIKYNDKFKGKATLTVDRSSSTAYMQLNSLTSEDSAVYFCKTSTFFFDYWGQGTTLTVSS

SEQ ID NO: 72 - protein, 113 aa, Artificial Sequence
  Synthesized
DIVMTQSPSSLTVTAGEKVTMICKSSQSLLNSGDQKNYLTWYQQKPGQPPKLLIFWASTRESGVPDRFTGSGSGTDFTLTISSVQAEDLAVYYCQNDYSYPLTFGAGTKLELK

SEQ ID NO: 73 - protein, 12 aa, Artificial Sequence
  Synthesized
QSLLNSGDQKNY

SEQ ID NO: 74 - protein, 107 aa, Artificial Sequence
  Synthesized
DIQMTQSPSSLSASVGDRVTITCRASQDISKYLNWYQQKPGKAPKLLIYHTSRLHSGVPSRFSGSGSGTDFTLTISSLQPEDFATYYCQQGNTLPYTFGQGTKVEIK

SEQ ID NO: 75 - protein, 9 aa, Artificial Sequence
  Synthesized
QNDYSYPLT

SEQ ID NO: 76 - protein, 8 aa, Artificial Sequence
  Synthesized
GYTFTDHA

SEQ ID NO: 77 - protein, 8 aa, Artificial Sequence
  Synthesized
FSPGNTDI

SEQ ID NO: 78 - protein, 9 aa, Artificial Sequence
  Synthesized
KTSTFFFDY

SEQ ID NO: 79 - protein, 246 aa, Artificial Sequence
  Synthesized
DIVMTQAAFSNPVTLGTSASISCRSSKSLLHSNGITYFFWYLQKPGLSPQLLIYQMSNLASGVPDRFSSSGSGTDFTLRISRVEAEDVGVYYCAQNLELPPTFGGGTKLEIKRAGGGGSGGGGSGGGGSEVKLVESGGGLVQPGGSMKLSCVASGFTFSNYWMNWVRQSPEKGLEWVAEIRLKSNNYTTHYAESVKGRFTISRDDSKSSVSLQMNNLRVEDTGIYYCTRHYYFDYWGQGTTLTVSS

SEQ ID NO: 80 - protein, 117 aa, Artificial Sequence
  Synthesized
EVKLVESGGGLVQPGGSMKLSCVASGFTFSNYWMNWVRQSPEKGLEWVAEIRLKSNNYTTHYAESVKGRFTISRDDSKSSVSLQMNNLRVEDTGIYYCTRHYYFDYWGQGTTLTVSS

SEQ ID NO: 81 - protein, 114 aa, Artificial Sequence
  Synthesized
DIVMTQAAFSNPVTLGTSASISCRSSKSLLHSNGITYFFWYLQKPGLSPQLLIYQMSNLASGVPDRFSSSGSGTDFTLRISRVEAEDVGVYYCAQNLELPPTFGGGTKLEIKRA

SEQ ID NO: 82 - protein, 16 aa, Artificial Sequence
  Synthesized
RSSKSLLHSNGITYFF

SEQ ID NO: 83 - protein, 7 aa, Artificial Sequence
  Synthesized
QMSNLAS

SEQ ID NO: 84 - protein, 9 aa, Artificial Sequence
  Synthesized
AQNLELPPT

SEQ ID NO: 85 - protein, 5 aa, Artificial Sequence
  Synthesized
NYWMN

SEQ ID NO: 86 - protein, 19 aa, Artificial Sequence
  Synthesized
EIRLKSNNYTTHYAESVKG

SEQ ID NO: 87 - protein, 6 aa, Artificial Sequence
  Synthesized
HYYFDY

SEQ ID NO: 88 - protein, 4 aa, Artificial Sequence
  Synthesized
GSTA

SEQ ID NO: 89 - protein, 97 aa, Artificial Sequence
  Synthesized
CSRAARGTIGARRTGQPLKEDPSAVPVFSVDAGELDFQWREKTPEPPVPCVPEQTEAATIVFPSGMGTSSPARRGSADGPRSAQPLRPEDGHCSWPL

SEQ ID NO: 90 - protein, 17 aa, Artificial Sequence
  Synthesized
CSRAARGTIDGHCSWPL

SEQ ID NO: 91 - protein, 21 aa, Artificial Sequence
  Synthesized
VGVVGGLLGSLVLLVWVLAVI

SEQ ID NO: 92 - protein, 18 aa, Artificial Sequence
  Synthesized
GNILNVSIKICLTLSPST

SEQ ID NO: 93 - protein, 9 aa, Artificial Sequence
  Synthesized
CSRAARGTI

SEQ ID NO: 94 - protein, 80 aa, Artificial Sequence
  Synthesized
GARRTGQPLKEDPSAVPVFSVDYGELDFQWREKTPEPPVPCVPEQTEYATIVFPSGMGTSSPARRGSADGPRSAQPLRPE

SEQ ID NO: 95 - protein, 80 aa, Artificial Sequence; identical to SEQ ID NO: 94
  Synthesized

SEQ ID NO: 96 - protein, 196 aa, Artificial Sequence
  Synthesized
QLVKSELEEKKSELRHKLKYVPHEYIELIEIARNSTQDRILEMKVMEFFMKVYGYRGKHLGGSRKPDGAIYTVGSPIDYGVIVDTKAYSGGYNLPIGQADEMQRYVEENQTRNKHINPNEWWKVYPSSVTEFKFLFVSGHFKGNYKAQLTRLNHITNCNGAVLSVEELLIGGEMIKAGTLTLEEVRRKFNNGEINF

SEQ ID NO: 97 - protein, 196 aa, Artificial Sequence
  Synthesized
QLVKSELEEKKSELRHKLKYVPHEYIELIEIARNSTQDRILEMKVMEFFMKVYGYRGKHLGGSRKPDGAIYTVGSPIDYGVIVDTKAYSGGYNLPIGQADEMQRYVKENQTRNKHINPNEWWKVYPSSVTEFKFLFVSGHFKGNYKAQLTRLNHKTNCNGAVLSVEELLIGGEMIKAGTLTLEEVRRKFNNGEINF

SEQ ID NO: 98 - protein, 196 aa, Artificial Sequence
  Synthesized
QLVKSELEEKKSELRHKLKYVPHEYIELIEIARNSTQDRILEMKVMEFFMKVYGYRGKHLGGSRKPDGAIYTVGSPIDYGVIVDTKAYSGGYNLPIGQADEMERYVEENQTRNKHLNPNEWWKVYPSSVTEFKFLFVSGHFKGNYKAQLTRLNHITNCNGAVLSVEELLIGGEMIKAGTLTLEEVRRKFNNGEINF

SEQ ID NO: 99 - protein, 323 aa, Artificial Sequence [sequence omitted]

SEQ ID NO: 100 - protein, 127 aa, Artificial Sequence
  Synthesized
MNVPTQLLGLLLLWLTGGKCDIQMTQSPASLSASLEEIVTITCKASQAIDAYLSWYQQKPGKSPQLLIYDATSLADGVPSRFSGSRSGTQYSLKISRPQVDDSGIYYCLQSYSTPFTFGSGTKLEIK

SEQ ID NO: 101 - protein, 184 aa, Homo sapiens
MAPLLPIRTLPLILILLALLSPGAADFNISSLSGLLSPALTESLLVALPPCHLTGGNATLMVRRANDSKVVTSSFVVPPCRGRRELVSVVDSGAGFTVTRLSAYQVTNLVPGTKFYISYLVKKGTATESSREIPMSTLPRRNMESIGLGMARTGGMVVITVLLSVAMFLLVLGFIIALALGSRK

SEQ ID NO: 102 - protein, 909 aa, Homo sapiens
MAARPLPVSPARALLLALAGALLAPCEARGVSLWNQGRADEVVSASVGSGDLWIPVKSFDSKNHPEVLNIRLQRESKELIINLERNEGLIASSFTETHYLQDGTDVSLARNYTVILGHCYYHGHVRGYSDSAVSLSTCSGLRGLIVFENESYVLEPMKSATNRYKLFPAKKLKSVRGSCGSHHNTPNLAAKNVFPPPSQTWARRHKRETLKATKYVELVIVADNREFQRQGKDLEKVKQRLIEIANHVDKFYRPLNIRIVLVGVEVWNDMDKCSVSQDPFTSLHEFLDWRKMKLLPRKSHDNAQLVSGVYFQGTTIGMAPIMSMCTADQSGGIVMDHSDNPLGAAVTLAHELGHNFGMNHDTLDRGCSCQMAVEKGGCIMNASTGYPFPMVFSSCSRKDLETSLEKGMGVCLFNLPEVRESFGGQKCGNRFVEEGEECDCGEPEECMNRCCNATTCTLKPDAVCAHGLCCEDCQLKPAGTACRDSSNSCDLPEFCTGASPHCPANVYLHDGHSCQDVDGYCYNGICQTHEQQCVTLWGPGAKPAPGICFERVNSAGDPYGNCGKVSKSSFAKCEMRDAKCGKIQCQGGASRPVIGTNAVSIETNIPLQQGGRILCRGTHVYLGDDMPDPGLVLAGTKCADGKICLNRQCQNISVFGVHECAMQCHGRGVCNNRKNCHCEAHWAPPFCDKFGFGGSTDSGPIRQADNQGLTIGILVTILCLLAAGFVVYLKRKTLIRLLFTNKKTTIEKLRCVRPSRPPRGFQPCQAHLGHLGKGLMRKPPDSYPPKDNPRRLLQCQNVDISRPLNGLNVPQPQSTQRVLPPLHRAPRAPSVPARPLPAKPALRQAQGTCKPNPPQKPLPADPLARTTRLTHALARTPGQWETGLRLAPLRPAPQYPHQVPRSTHTAYIK

SEQ ID NO: 103 - protein, 553 aa, Homo sapiens
MVQRLWVSRLLRHRKAQLLLVNLLTFGLEVCLAAGITYVPPLLLEVGVEEKFMTMVLGIGPVLGLVCVPLLGSASDHWRGRYGRRRPFIWALSLGILLSLFLIPRAGWLAGLLCPDPRPLELALLILGVGLLDFCGQVCFTPLEALLSDLFRDPDHCRQAYSVYAFMISLGGCLGYLLPAIDWDTSALAPYLGTQEECLFGLLTLIFLTCVAATLLVAEEAALGPTEPAEGLSAPSLSPHCCPCRARLAFRNLGALLPRLHQLCCRMPRTLRRLFVAELCSWMALMTFTLFYTDFVGEGLYQGVPRAEPGTEARRHYDEGVRMGSLGLFLQCAISLVFSLVMDRLVQRFGTRAVYLASVAAFPVAAGATCLSHSVAVVTASAALTGFTFSALQILPYTLASLYHREKQVFLPKYRGDTGGASSEDSLMTSFLPGPKPGAPFPNGHVGAGGSGLLPPPPALCGASACDVSVRVVVGEPTEARVVPGRGICLDLAILDSAFLLSQVAPSLFMGSIVQLSQSVTAYMVSAAGLGLVAIYFATQVVFDKSDLAKYSA

SEQ ID NO: 104 - protein, 418 aa, Homo sapiens
MRAAPLLLARAASLSLGFLFLLFFWLDRSVLAKELKFVTLVFRHGDRSPIDTFPTDPIKESSWPQGFGQLTQLGMEQHYELGEYIRKRYRKFLNESYKHEQVYIRSTDVDRTLMSAMTNLAALFPPEGVSIWNPILLWQPIPVHTVPLSEDQLLYLPFRNCPRFQELESETLKSEEFQKRLHPYKDFIATLGKLSGLHGQDLFGIWSKVYDPLYCESVHNFTLPSWATEDTMTKLRELSELSLLSLYGIHKQKEKSRLQGGVLVNEILNHMKRATQIPSYKKLIMYSAHDTTVSGLQMALDVYNGLLPPYASCHLTELYFEKGEYFVEMYYRNETQHEPYPLMLPGCSPSCPLERFAELVGPVIPQDWSTECMTTNSHQVLKVIFAVAFCLISAVLMVLLFIHIRRGLCWQRESYGNI

SEQ ID NO: 105 - protein, 560 aa, Homo sapiens
MKMQKGNVLLMFGLLLHLEAATNSNETSTSANTGSSVISSGASTATNSGSSVTSSGVSTATISGSSVTSNGVSIVTNSEFHTTSSGISTATNSEFSTVSSGISIATNSESSTTSSGASTATNSESSTPSSGASTATNSDSSTTSSGASTATNSDSSTTSSEASTATNSESSTTSSGASTATNSESSTVSSRASTATNSESSTTSSGASTATNSESRTTSNGAGTATNSESSTTSSGASTATNSESSTPSSGAGTATNSESSTTSSGAGTATNSESSTVSSGISTVTNSESSTPSSGANTATNSESSTTSSGANTATNSDSSTTSSGASTATNSESSTTSSGASTATNSESSTTSSGASTATNSGSSTTSSGTSTATNSESSTVSSGASTATTSESSTTSSGASTATNSESSTVSSGASTATNSESSTTSSGANTATNSGSSVTSAGSGTAALTGMHTTSHSASTAVSEAKPGGSLVPWEIFLITLVSVVAAVGLFAGLFFCVRNSLSLRNTFNTAVYHPHGLNHGLGPGPGGNHGAPHRPRWSPNWFWRRPVSSIAMEMS

SEQ ID NO: 106 - protein, 14507 aa, Homo sapiens
MLKPSGLPGSSSPTRSLMTGSRSTKATPEMDSGLTGATLSPKTSTGAIVVTEHTLPFTSPDKTLASPTSSVVGRTTQSLGVMSSALPESTSRGMTHSEQRTSPSLSPQVNGTPSRNYPATSMVSGLSSPRTRTSSTEGNFTKEASTYTLTVETTSGPVTEKYTVPTETSTTEGDSTETPWDTRYIPVKITSPMKTFADSTASKENAPVSMTPAETTVTDSHTPGRTNPSFGTLYSSFLDLSPKGTPNSRGETSLELILSTTGYPFSSPEPGSAGHSRISTSAPLSSSASVLDNKISETSIFSGQSLTSPLSPGVPEARASTMPNSAIPFSMTLSNAETSAERVRSTISSLGTPSISTKQTAETILTFHAFAETMDIPSTHIAKTLASEWLGSPGTLGGTSTSALTTTSPSTTLVSEETNTHHSTSGKETEGTLNTSMTPLETSAPGEESEMTATLVPTLGFTTLDSKIRSPSQVSSSHPTRELRTTGSTSGRQSSSTAAHGSSDILRATTSSTSKASSWTSESTAQQFSEPQHTQWVETSPSMKTERPPASTSVAAPITTSVPSVVSGFTTLKTSSTKGIWLEETSADTLIGESTAGPTTHQFAVPTGISMTGGSSTRGSQGTTHLLTRATASSETSADLTLATNGVPVSVSPAVSKTAAGSSPPGGTKPSYTMVSSVIPETSSLQSSAFREGTSLGLTPLNTRHPFSSPEPDSAGHTKISTSIPLLSSASVLEDKVSATSTFSHHKATSSITTGTPEISTKTKPSSAVLSSMTLSNAATSPERVRNATSPLTHPSPSGEETAGSVLTLSTSAETTDSPNIHPTGTLTSESSESPSTLSLPSVSGVKTTFSSSTPSTHLFTSGEETEETSNPSVSQPETSVSRVRTTLASTSVPTPVFPTMDTWPTRSAQFSSSHLVSELRATSSTSVTNSTGSALPKISHLTGTATMSQTNRDTFNDSAAPQSTTWPETSPRFKTGLPSATTTVSTSATSLSATVMVSKFTSPATSSMEATSIREPSTTILTTETTNGPGSMAVASTNIPIGKGYITEGRLDTSHLPIGTTASSETSMDFTMAKESVSMSVSPSQSMDAAGSSTPGRTSQFVDTFSDDVYHLTSREITIPRDGTSSALTPQMTATHPPSPDPGSARSTWLGILSSSPSSPTPKVTMSSTFSTQRVTTSMIMDTVETSRWNMPNLPSTTSLTPSNIPTSGAIGKSTLVPLDTPSPATSLEASEGGLPTLSTYPESTNTPSIHLGAHASSESPSTIKLTMASVVKPGSYTPLTFPSIETHIHVSTARMAYSSGSSPEMTAPGETNTGSTWDPTTYITTTDPKDTSSAQVSTPHSVRTLRTTENHPKTESATPAAYSGSPKISSSPNLTSPATKAWTITDTTEHSTQLHYTKLAEKSSGFETQSAPGPVSVVIPTSPTIGSSTLELTSDVPGEPLVLAPSEQTTITLPMATWLSTSLTEEMASTDLDISSPSSPMSTFAIFPPMSTPSHELSKSEADTSAIRNTDSTTLDQHLGIRSLGRTGDLTTVPITPLTTTWTSVIEHSTQAQDTLSATMSPTHVTQSLKDQTSIPASASPSHLTEVYPELGTQGRSSSEATTFWKPSTDTLSREIETGPTNIQSTPPMDNTTTGSSSSGVTLGIAHLPIGTSSPAETSTNMALERRSSTATVSMAGTMGLLVTSAPGRSISQSLGRVSSVLSESTTEGVTDSSKGSSPRLNTQGNTALSSSLEPSYAEGSQMSTSIPLTSSPTTPDVEFIGGSTFWTKEVTTVMTSDISKSSARTESSSATLMSTALGSTENTGKEKLRTASMDLPSPTPSMEVTPWISLTLSNAPNTTDSLDLSHGVHTSSAGTLATDRSLNTGVTRASRLENGSDTSSKSLSMGNSTHTSMTYTEKSEVSSSIHPRPETSAPGAETTLTSTPGNRAISLTLPFSSIPVEEVISTGITSGPDINSAPMTHSPITPPTIVWTSTGTIEQSTQPLHAVSSEKVSVQTQSTPYVNSVAVSASPTHENSVSSGSSTSSPYSSASLESLDSTISRRNAITSWLWDLTTSLPTTTWPSTSLSEALSSGHSGVSNPSSTTTEFPLFSAASTSAAKQRNPETETHGPQNTAASTLNTDASSVTGLSETPVGASISSEVPLPMAITSRSDVSGLTSESTANPSLGTASSAGTKLTRTISLPTSESLVSFRMNKDPWTVSIPLGSHPTTNTETSIPVNSAGPPGLSTVASDVIDTPSDGAESIPTVSFSPSPDTEVTTISHFPEKTTHSFRTISSLTHELTSRVTPIPGDWMSSAMSTKPTGASPSITLGERRTITSAAPTTSPIVLTASFTETSTVSLDNETTVKTSDILDARKTNELPSDSSSSSDLINTSIASSTMDVTKTASISPTSISGMTASSSPSLFSSDRPQVPTSTTETNTATSPSVSSNTYSLDGGSNVGGTPSTLPPFTITHPVETSSALLAWSRPVRTFSTMVSTDTASGENPTSSNSVVTSVPAPGTWTSVGSTTDLPAMGFLKTSPAGEAHSLLASTIEPATAFTPHLSAAVVTGSSATSEASLLTTSESKAIHSSPQTPTTPTSGANWETSATPESLLVVTETSDTTLTSKILVTDTILFSTVSTPPSKFPSTGTLSGASFPTLLPDTPAIPLTATEPTSSLATSFDSTPLVTIASDSLGTVPETTLTMSETSNGDALVLKTVSNPDRSIPGITIQGVTESPLHPSSTSPSKIVAPRNTTYEGSITVALSTLPAGTTGSLVFSQSSENSETTALVDSSAGLERASVMPLTTGSQGMASSGGIRSGSTHSTGTKTFSSLPLTMNPGEVTAMSEITTNRLTATQSTAPKGIPVKPTSAESGLLTPVSASSSPSKAFASLTTAPPTWGIPQSTLTFEFSEVPSLDTKSASLPTPGQSLNTIPDSDASTASSSLSKSPEKNPRARMMTSTKAISASSFQSTGFTETPEGSASPSMAGHEPRVPTSGTGDPRYASESMSYPDPSKASSAMTSTSLASKLTTLFSTGQAARSGSSSSPISLSTEKETSFLSPTASTSRKTSLFLGPSMARQPNILVHLQTSALTLSPTSTLNMSQEEPPELTSSQTIAEEEGTTAETQTLTFTPSETPTSLLPVSSPTEPTARRKSSPETWASSISVPAKTSLVETTDGTLVTTIKMSSQAAQGNSTWPAPAEETGSSPAGTSPGSPEMSTTLKIMSSKEPSISPEIRSTVRNSPWKTPETTVPMETTVEPVTLQSTALGSGSTSISHLPTGTTSPTKSPTENMLATERVSLSPSPPEAWTNLYSGTPGGTRQSLATMSSVSLESPTARSITGTGQQSSPELVSKTTGMEFSMWHGSTGGTTGDTHVSLSTSSNILEDPVTSPNSVSSLTDKSKHKTETWVSTTAIPSTVLNNKIMAAEQQTSRSVDEAYSSTSSWSDQTSGSDITLGASPDVTNTLYITSTAQTTSLVSLPSGDQGITSLTNPSGGKTSSASSVTSPSIGLETLRANVSAVKSDIAPTAGHLSQTSSPAEVSILDVTTAPTPGISTTITTMGTNSISTTTPNPEVGMSTMDSTPATERRTTSTEHPSTWSSTAASDSWTVTDMTSNLKVARSPGTISTMHTTSFLASSTELDSMSTPHGRITVIGTSLVTPSSDASAVKTETSTSERTLSPSDTTASTPISTFSRVQRMSISVPDILSTSWTPSSTEAEDVPVSMVSTDHASTKTDPNTPLSTFLFDSLSTLDWDTGRSLSSATATTSAPQGATTPQELTLETMISPATSQLPFSIGHITSAVTPAAMARSSGVTFSRPDPTSKKAEQTSTQLPTTTSAHPGQVPRSAATTLDVIPHTAKTPDATFQRQGQTALTTEARATSDSWNEKEKSTPSAPWITEMMNSVSEDTIKEVTSSSSVLRTLNTLDINLESGTTSSPSWKSSPYERIAPSESTTDKEAIHPSTNTVETTGWVTSSEHASHSTIPAHSASSKLTSPVVTTSTREQAIVSMSTTTWPESTRARTEPNSFLTIELRDVSPYMDTSSTTQTSIISSPGSTAITKGPRTEITSSKRISSSFLAQSMRSSDSPSEAITRLSNFPAMTESGGMILAMQTSPPGATSLSAPTLDTSATASWTGTPLATTQRFTYSEKTTLFSKGPEDTSQPSPPSVEETSSSSSLVPIHATTSPSNILLTSQGHSPSSTPPVTSVFLSETSGLGKTTDMSRISLEPGTSLPPNLSSTAGEALSTYEASRDTKAIHHSADTAVTNMEATSSEYSPIPGHTKPSKATSPLVTSHIMGDITSSTSVFGSSETTEIETVSSVNQGLQERSTSQVASSATETSTVITHVSSGDATTHVTKTQATFSSGTSISSPHQFITSTNTFTDVSTNPSTSLIMTESSGVTITTQTGPTGAATQGPYLLDTSTMPYLTETPLAVTPDFMQSEKTTLISKGPKDVSWTSPPSVAETSYPSSLTPFLVTTIPPATSTLQGQHTSSPVSATSVLTSGLVKTTDMLNTSMEPVTNSPQNLNNPSNEILATLAATTDIETIHPSINKAVTNMGTASSAHVLHSTLPVSSEPSTATSPMVPASSMGDALASISIPGSETTDIEGEPTSSLTAGRKENSTLQEMNSTTESNIILSNVSVGAITEATKMEVPSFDATFIPTPAQSTKFPDIFSVASSRLSNSPPMTISTHMTTTQTGSSGATSKIPLALDTSTLETSAGTPSVVTEGFAHSKITTAMNNDVKDVSQTNPPFQDEASSPSSQAPVLVTTLPSSVAFTPQWHSTSSPVSMSSVLTSSLVKTAGKVDTSLETVTSSPQSMSNTLDDISVTSAATTDIETTHPSINTVVTNVGTTGSAFESHSTVSAYPEPSKVTSPNVTTSTMEDTTISRSIPKSSKTTRTETETTSSLTPKLRETSISQEITSSTETSTVPYKELTGATTEVSRTDVTSSSSTSFPGPDQSTVSLDISTETNTRLSTSPIMTESAEITITTQTGPHGATSQDTFTMDPSNTTPQAGIHSAMTHGFSQLDVTTLMSRIPQDVSWTSPPSVDKTSSPSSFLSSPAMTTPSLISSTLPEDKLSSPMTSLLTSGLVKITDILRTRLEPVTSSLPNFSSTSDKILATSKDSKDTKEIFPSINTEETNVKANNSGHESHSPALADSETPKATTQMVITTTVGDPAPSTSMPVHGSSETTNIKREPTYFLTPRLRETSTSQESSFPTDTSFLLSKVPTGTITEVSSTGVNSSSKISTPDHDKSTVPPDTFTGEIPRVFTSSIKTKSAEMTITTQASPPESASHSTLPLDTSTTLSQGGTHSTVTQGFPYSEVTTLMGMGPGNVSWMTTPPVEETSSVSSLMSSPAMTSPSPVSSTSPQSIPSSPLPVTALPTSVLVTTTDVLGTTSPESVTSSPPNLSSITHERPATYKDTAHTEAAMHHSTNTAVTNVGTSGSGHKSQSSVLADSETSKATPLMSTTSTLGDTSVSTSTPNISQTNQIQTEPTASLSPRLRESSTSEKTSSTTETNTAFSYVPTGAITQASRTEISSSRTSISDLDRPTIAPDISTGMITRLFTSPIMTKSAEMTVTTQTTTPGATSQGILPWDTSTTLFQGGTHSTVSQGFPHSEITTLRSRTPGDVSWMTTPPVEETSSGFSLMSPSMTSPSPVSSTSPESIPSSPLPVTALLTSVLVTTTNVLGTTSPEPVTSSPPNLSSPTQERLTTYKDTAHTEAMHASMHTNTAVANVGTSISGHESQSSVPADSHTSKATSPMGITFAMGDTSVSTSTPAFFETRIQTESTSSLIPGLRDTRTSEEINTVTETSTVLSEVPTTTTTEVSRTEVITSSRTTISGPDHSKMSPYISTETITRLSTFPFVTGSTEMAITNQTGPIGTISQATLTLDTSSTASWEGTHSPVTQRFPHSEETTTMSRSTKGVSWQSPPSVEETSSPSSPVPLPAITSHSSLYSAVSGSSPTSALPVTSLLTSGRRKTIDMLDTHSELVTSSLPSASSFSGEILTSEASTNTETIHFSENTAETNMGTTNSMHKLHSSVSIHSQPSGHTPPKVTGSMMEDAIVSTSTPGSPETKNVDRDSTSPLTPELKEDSTALVMNSTTESNTVFSSVSLDAATEVSRAEVTYYDPTFMPASAQSTKSPDISPEASSSHSNSPPLTISTHKTIATQTGPSGVTSLGQLTLDTSTIATSAGTPSARTQDFVDSETTSVMNNDLNDVLKTSPFSAEEANSLSSQAPLLVTTSPSPVTSTLQEHSTSSLVSVTSVPTPTLAKITDMDTNLEPVTRSPQNLRNTLATSEATTDTHTMHPSINTAVANVGTTSSPNEFYFTVSPDSDPYKATSAVVITSTSGDSIVSTSMPRSSAMKKIESETTFSLIFRLRETSTSQKIGSSSDTSTVFDKAFTAATTEVSRTELTSSSRTSIQGTEKPTMSPDTSTRSVTMLSTFAGLTKSEERTIATQTGPHRATSQGTLTWDTSITTSQAGTHSAMTHGFSQLDLSTLTSRVPEYISGTSPPSVEKTSSSSSLLSLPAITSPSPVPTTLPESRPSSPVHLTSLPTSGLVKTTDMLASVASLPPNLGSTSHKIPTTSEDIKDTEKMYPSTNIAVTNVGTTTSEKESYSSVPAYSEPPKVTSPMVTSFNIRDTIVSTSMPGSSEITRIEMESTFSLAHGLKGTSTSQDPIVSTEKSAVLHKLTTGATETSRTEVASSRRTSIPGPDHSTESPDISTEVIPSLPISLGITESSNMTIITRTGPPLGSTSQGTFTLDTPTTSSRAGTHSMATQEFPHSEMTTVMNKDPEILSWTIPPSIEKTSFSSSLMPSPAMTSPPVSSTLPKTIHTTPSPMTSLLTPSLVMTTDTLGTSPEPTTSSPPNLSSTSHEILTTDEDTTAIEAMHPSTSTAATNVETTSSGHGSQSSVLADSEKTKATAPMDTTSTMGHTTVSTSMSVSSETTKIKRESTYSLTPGLRETSISQNASFSTDTSIVLSEVPTGTTAEVSRTEVTSSGRTSIPGPSQSTVLPEISTRTMTRLFASPTMTESAEMTIPTQTGPSGSTSQDTLTLDTSTTKSQAKTHSTLTQRFPHSEMTTLMSRGPGDMSWQSSPSLENPSSLPSLLSLPATTSPPPISSTLPVTISSSPLPVTSLLTSSPVTTTDMLHTSPELVTSSPPKLSHTSDERLTTGKDTTNTEAVHPSTNTAASNVEIPSSGHESPSSALADSETSKATSPMFITSTQEDTTVAISTPHFLETSRIQKESISSLSPKLRETGSSVETSSAIETSAVLSEVSIGATTEISRTEVTSSSRTSISGSAESTMLPEISTTRKIIKFPTSPILAESSEMTIKTQTSPPGSTSESTFTLDTSTTPSLVITHSTMTQRLPHSEITTLVSRGAGDVPRPSSLPVEETSPPSSQLSLSAMISPSPVSSTLPASSHSSSASVTSLLTPGQVKTTEVLDASAEPETSSPPSLSSTSVEILATSEVTTDTEKIHPFSNTAVTKVGTSSSGHESPSSVLPDSETTKATSAMGTISIMGDTSVSTLTPALSNTRKIQSEPASSLTTRLRETSTSEETSLATEANTVLSKVSTGATTEVSRTEAISFSRTSMSGPEQSTMSQDISIGTIPRISASSVLTESAKMTITTQTGPSESTLESTLNLNTATTPSWVETHSIVIQGFPHPEMTTSMGRGPGGVSWPSPPFVKETSPPSSPLSLPAVTSPHPVSTTFLAHIPPSPLPVTSLLTSGPATTTDILGTSTEPGTSSSSSLSTTSHERLTTYKDTAHTEAVHPSTNTGGTNVATTSSGYKSQSSVLADSSPMCTTSTMGDTSVLTSTPAFLETRRIQTELASSLTPGLRESSGSEGTSSGTKMSTVLSKVPTGATTEISKEDVTSIPGPAQSTISPDISTRTVSWFSTSPVMTESAEITMNTHTSPLGATTQGTSTLDTSSTTSLTMTHSTISQGFSHSQMSTLMRRGPEDVSWMSPPLLEKTRPSFSLMSSPATTSPSPVSSTLPESISSSPLPVTSLLTSGLAKTTDMLHKSSEPVTNSPANLSSTSVEILATSEVTTDTEKTHPSSNRTVTDVGTSSSGHESTSFVLADSQTSKVTSPMVITSTMEDTSVSTSTPGFFETSRIQTEPTSSLTLGLRKTSSSEGTSLATEMSTVLSGVPTGATAEVSRTEVTSSSRTSISGFAQLTVSPETSTETITRLPTSSIMTESAEMMIKTQTDPPGSTPESTHTVDISTTPNWVETHSTVTQRFSHSEMTTLVSRSPGDMLWPSQSSVEETSSASSLLSLPATTSPSPVSSTLVEDFPSASLPVTSLLNPGLVITTDRMGISREPGTSSTSNLSSTSHERLTTLEDTVDTEDMQPSTHTAVTNVRTSISGHESQSSVLSDSETPKATSPMGTTYTMGETSVSISTSDFFETSRIQIEPTSSLTSGLRETSSSERISSATEGSTVLSEVPSGATTEVSRTEVISSRGTSMSGPDQFTISPDISTEAITRLSTSPIMTESAESAITIETGSPGATSEGTLTLDTSTTTFWSGTHSTASPGFSHSEMTTLMSRTPGDVPWPSLPSVEEASSVSSSLSSPAMTSTSFFSTLPESISSSPHPVTALLTLGPVKTTDMLRTSSEPETSSPPNLSSTSAEILATSEVTKDREKIHPSSNTPVVNVGTVIYKHLSPSSVLADLVTTKPTSPMATTSTLGNTSVSTSTPAFPETMMTQPTSSLTSGLREISTSQETSSATERSASLSGMPTGATTKVSRTEALSLGRTSTPGPAQSTISPEISTETITRISTPLTTTGSAEMTITPKTGHSGASSQGTFTLDTSSRASWPGTHSAATHRSPHSGMTTPMSRGPEDVSWPSRPSVEKTSPPSSLVSLSAVTSPSPLYSTPSESSHSSPLRVTSLFTPVMMKTTDMLDTSLEPVTTSPPSMNITSDESLATSKATMETEAIQLSENTAVTQMGTISARQEFYSSYPGLPEPSKVTSPVVTSSTIKDIVSTTIPASSEITRIEMESTSTLTPTPRETSTSQEIHSATKPSTVPYKALTSATIEDSMTQVMSSSRGPSPDQSTMSQDISTEVITRLSTSPIKTESTEMTITTQTGSPGATSRGTLTLDTSTTFMSGTHSTASQGFSHSQMTALMSRTPGDVPWLSHPSVEEASSASFSLSSPVMTSSSPVSSTLPDSIHSSSLPVTSLLTSGLVKTTELLGTSSEPETSSPPNLSSTSAEILAITEVTTDTEKLEMTNVVTSGYTHESPSSVLADSVTTKATSSMGITYPTGDTNVLTSTPAFSDTSRIQTKSKLSLTPGLMETSISEETSSATEKSTVLSSVPTGATTEVSRTEAISSSRTSIPGPAQSTMSSDTSMETITRISTPLTRKESTDMAITPKTGPSGATSQGTFTLDSSSTASWPGTHSATTQRFPQSVVTTPMSRGPEDVSWPSPLSVEKNSPPSSLVSSSSVTSPSPLYSTPSGSSHSSPVPVTSLFTSIMMKATDMLDASLEPETTSAPNMNITSDESLAASKATTETEAIHVFENTAASHVETTSATEELYSSSPGFSEPTKVISPVVTSSSIRDNMVSTTMPGSSGITRIEIESMSSLTPGLRETRTSQDITSSTETSTVLYKMPSGATPEVSRTEVMPSSRTSIPGPAQSTMSLDISDEVVTRLSTSPIMTESAEITITTQTGYSLATSQVTLPLGTSMTFLSGTHSTMSQGLSHSEMTNLMSRGPESLSWTSPRFVETTRSSSSLTSLPLTTSLSPVSSTLLDSSPSSPLPVTSLILPGLVKTTEVLDTSSEPKTSSSPNLSSTSVEIPATSEIMTDTEKIHPSSNTAVAKVRTSSSVHESHSSVLADSETTITIPSMGITSAVDDTTVFTSNPAFSETRRIPTEPTFSLTPGFRETSTSEETTSITETSAVLYGVPTSATTEVSMTEIMSSNRIHIPDSDQSTMSPDIITEVITRLSSSSMMSESTQMTITTQKSSPGATAQSTLTLATTTAPLARTHSTVPPRFLHSEMTTLMSRSPENPSWKSSLFVEKTSSSSSLLSLPVTTSPSVSSTLPQSIPSSSFSVTSLLTPGMVKTTDTSTEPGTSLSPNLSGTSVEILAASEVTTDTEKIHPSSSMAVTNVGTTSSGHELYSSVSIHSEPSKATYPVGTPSSMAETSISTSMPANFETTGFEAEPFSHLTSGFRKTNMSLDTSSVTPTNTPSSPGSTHLLQSSKTDFTSSAKTSSPDWPPASQYTEIPVDIITPFNASPSITESTGITSFPESRFTMSVTESTHHLSTDLLPSAETISTGTVMPSLSEAMTSFATTGVPRAISGSGSPFSRTESGPGDATLSTIAESLPSSTPVPFSSSTFTTTDSSTIPALHEITSSSATPYRVDTSLGTESSTTEGRLVMVSTLDTSSQPGRTSSSPILDTRMTESVELGTVTSAYQVPSLSTRLTRTDGIMEHITKIPNEAAHRGTIRPVKGPQTSTSPASPKGLHTGGTKRMETTTTALKTTTTALKTTSRATLTTSVYTPTLGTLTPLNASMQMASTIPTEMMITTPYVFPDVPETTSSLATSLGAETSTALPRTTPSVFNRESETTASLVSRSGAERSPVIQTLDVSSSEPDTTASWVIHPAETIPTVSKTTPNFFHSELDTVSSTATSHGADVSSAIPTNISPSELDALTPLVTISGTDTSTTFPTLTKSPHETETRTTWLTHPAETSSTIPRTIPNFSHHESDATPSIATSPGAETSSAIPIMTVSPGAEDLVTSQVTSSGTDRNMTIPTLTLSPGEPKTIASLVTHPEAQTSSAIPTSTISPAVSRLVTSMVTSLAAKTSTTNRALTNSPGEPATTVSLVTHPAQTSPTVPWTTSIFFHSKSDTTPSMTTSHGAESSSAVPTPTVSTEVPGVVTPLVTSSRAVISTTIPILTLSPGEPETTPSMATSHGEEASSAIPTPTVSPGVPGVVTSLVTSSRAVTSTTIPILTFSLGEPETTPSMATSHGTEAGSAVPTVLPEVPGMVTSLVASSRAVTSTTLPTLTLSPGEPETTPSMATSHGAEASSTVPTVSPEVPGVVTSLVTSSSGVNSTSIPTLILSPGELETTPSMATSHGAEASSAVPTPTVSPGVSGVVTPLVTSSRAVTSTTIPILTLSSSEPETTPSMATSHGVEASSAVLTVSPEVPGMVTSLVTSSRAVTSTTIPTLTISSDEPETTTSLVTHSEAKMISAIPTLAVSPTVQGLVTSLVTSSGSETSAFSNLTVASSQPETIDSWVAHPGTEASSVVPTLTVSTGEPFTNISLVTHPAESSSTLPRTTSRFSHSELDTMPSTVTSPEAESSSAISTTISPGIPGVLTSLVTSSGRDISATFPTVPESPHESEATASWVTHPAVTSTTVPRTTPNYSHSEPDTTPSIATSPGAEATSDFPTITVSPDVPDMVTSQVTSSGTDTSITIPTLTLSSGEPETTTSFITYSETHTSSAIPTLPVSPGASKMLTSLVISSGTDSTTTFPTLTETPYEPETTAIQLIHPAETNTMVPRTTPKFSHSKSDTTLPVAITSPGPEASSAVSTTTISPDMSDLVTSLVPSSGTDTSTTFPTLSETPYEPETTATWLTHPAETSTTVSGTIPNFSHRGSDTAPSMVTSPGVDTRSGVPTTTIPPSIPGVVTSQVTSSATDTSTAIPTLTPSPGEPETTASSATHPGTQTGFTVPIRTVPSSEPDTMASWVTHPPQTSTPVSRTTSSFSHSSPDATPVMATSPRTEASSAVLTTISPGAPEMVTSQITSSGAATSTTVPTLTHSPGMPETTALLSTHPRTETSKTFPASTVFPQVSETTASLTIRPGAETSTALPTQTTSSLFTLLVTGTSRVDLSPTASPGVSAKTAPLSTHPGTETSTMIPTSTLSLGLLETTGLLATSSSAETSTSTLTLTVSPAVSGLSSASITTDKPQTVTSWNTETSPSVTSVGPPEFSRTVTGTTMTLIPSEMPTPPKTSHGEGVSPTTILRTTMVEATNLATTGSSPTVAKTTTTFNTLAGSLFTPLTTPGMSTLASESVTSRTSYNHRSWISTTSSYNRRYWTPATSTPVTSTFSPGISTSSIPSSTAATVPFMVPFTLNFTITNLQYEEDMRHPGSRKFNATERELQGLLKPLFRNSSLEYLYSGCRLASLRPEKDSSATAVDAICTHRPDPEDLGLDRERLYWELSNLTNGIQELGPYTLDRNSLYVNGFTHRSSMPTTSTPGTSTVDVGTSGTPSSSPSPTTAGPLLMPFTLNFTITNLQYEEDMRRTGSRKFNTMESVLQGLLKPLFKNTSVGPLYSGCRLTLLRPEKDGAATGVDAICTHRLDPKSPGLNREQLYWELSKLTNDIEELGPYTLDRNSLYVNGFTHQSSVSTTSTPGTSTVDLRTSGTPSSLSSPTIMAAGPLLVPFTLNFTITNLQYGEDMGHPGSRKFNTTERVLQGLLGPIFKNTSVGPLYSGCRLTSLRSEKDGAATGVDAICIHHLDPKSPGLNRERLYWELSQLTNGIKELGPYTLDRNSLYVNGFTHRTSVPTSSTPGTSTVDLGTSGTPFSLPSPATAGPLLVLFTLNFTITNLKYEEDMHRPGSRKFNTTERVLQTLLGPMFKNTSVGLLYSGCRLTLLRSEKDGAATGVDAICTHRLDPKSPGVDREQLYWELSQLTNGIKELGPYTLDRNSLYVNGFTHWIPVPTSSTPGTSTVDLGSGTPSSLPSPTTAGPLLVPFTLNFTITNLKYEEDMHCPGSRKFNTTERVLQSLLGPMFKNTSVGPLYSGCRLTLLRSEKDGAATGVDAICTHRLDPKSPGVDREQLYWELSQLTNGIKELGPYTLDRNSLYVNGFTHQTSAPNTSTPGTSTVDLGTSGTPSSLPSPTSAGPLLVPFTLNFTITNLQYEEDMHHPGSRKFNTTERVLQGLLGPMFKNTSVGLLYSGCRLTLLRPEKNGAATGMDAICSHRLDPKSPGLNREQLYWELSQLTHGIKELGPYTLDRNSLYVNGFTHRSSVAPTSTPGTSTVDLGTSGTPSSLPSPTTAVPLLVPFTLNFTITNLQYGEDMRHPGSRKFNTTERVLQGLLGPLFKNSSVGPLYSGCRLISLRSEKDGAATGVDAICTHHLNPQSPGLDREQLYWQLSQMTNGIKELGPYTLDRNSLYVNGFTHRSSGLTTSTPWTSTVDLGTSGTPSPVPSPTTTGPLLVPFTLNFTITNLQYEENMGHPGSRKFNITESVLQGLLKPLFKSTSVGPLYSGCRLTLLRPEKDGVATRVDAICTHRPDPKIPGLDRQQLYWELSQLTHSITELGPYTLDRDSLYVNGFTQRSSVPTTSTPGTFTVQPETSETPSSLPGPTATGPVLLPFTLNFTITNLQYEEDMRRPGSRKFNTTERVLQGLLMPLFKNTSVSSLYSGCRLTLLRPEKDGAATRVDAVCTHRPDPKSPGLDRERLYWKLSQLTHGITELGPYTLDRHSLYVNGFTHQSSMTTTRTPDTSTMHLATSRTPASLSGPMTASPLLVLFTINFTITNLRYEENMHHPGSRKFNTTERVLQGLLRPVFKNTSVGPLYSGCRLTLLRPKKDGAATKVDAICTYRPDPKSPGLDREQLYWELSQLTHSITELGPYTLDRDSLYVNGFTQRSSVPTTSIPGTPTVDLGTSGTPVSKPGPSAASPLLVLFTLNFTITNLRYEENMQHPGSRKFNTTERVLQGLLRSLFKSTSVGPLYSGCRLTLLRPEKDGTATGVDAICTHHPDPKSPRLDREQLYWELSQLTHNITELGPYALDNDSLFVNGFTHRSSVSTTSTPGTPTVYLGASKTPASIFGPSAASHLLILFTLNFTITNLRYEENMWPGSRKFNTTERVLQGLLRPLFKNTSVGPLYSGCRLTLLRPEKDGEATGVDAICTHRPDPTGPGLDREQLYLELSQLTHSITELGPYTLDRDSLYVNGFTHRSSVPTTSTGVVSEEPFTLNFTINNLRYMADMGQPGSLKFNITDNVMQHLLSPLFQRSSLGARYTGCRVIALRSVKNGAETRVDLLCTYLQPLSGPGLPIKQVFHELSQQTHGITRLGPYSLDKDSLYLNGYNEPGPDEPPTTPKPATTFLPPLSEATTAMGYHLKTLTLNFTISNLQYSPDMGKGSATFNSTEGVLQHLLRPLFQKSSMGPFYLGCQLISLRPEKDGAATGVDTTCTYHPDPVGPGLDIQQLYWELSQLTHGVTQLGFYVLDRDSLFINGYAPQNLSIRGEYQINFHIVNWNLSNPDPTSSEYITLLRDIQDKVTTLYKGSQLHDTFRFCLVTNLTMDSVLVTVKALFSSNLDPSLVEQVFLDKTLNASFHWLGSTYQLVDIHVTEMESSVYQPTSSSSTQHFYLNFTITNLPYSQDKAQPGTTNYQRNKRNIEDALNQLFRNSSIKSYFSDCQVSTFRSVPNRHHTGVDSLCNFSPLARRVDRVAIYEEFLRMTRNGTQLQNFTLDRSSVLVDGYSPNRNEPLTGNSDLPFWAVILIGLAGLLGVITCLICGVLVTTRRRKKEGEYNVQQQCPGYYQSHLDLEDLQ

SEQ ID NO: 107 - protein, 267 aa, Homo sapiens
MMSSKPTSHAEVNETIPNPYPPSSFMAPGFQQPLGSINLENQAQGAQRAQPYGITSPGIFASSQPGQGNIQMINPSVGTAVMNFKEEAKALGVIQIMVGLMHIGFGIVLCLISFSFREVLGFASTAVIGGYPFWGGLSFIISGSLSVSASKELSRCLVKGSLGMNIVSSILAFIGVILLLVDMCINGVAGQDYWAVLSGKGISATLMIFSLLEFFVACATAHFANQANTTTNMSVLVIPNMYESNPVTPASSSAPPRCNNYSANAPK

SEQ ID NO: 108 - protein, 535 aa, Homo sapiens
MLGPCMLLLLLLLGLRLQLSLGIIPVEEENPDFWNREAAEALGAAKKLQPAQTAAKNLIIFLGDGMGVSTVTAARILKGQKKDKLGPEIPLAMDRFPYVALSKTYNVDKHVPDSGATATAYLCGVKGNFQTIGLSAAARFNQCNTTRGNEVISVMNRAKKAGKSVGVVTTTRVQHASPAGTYAHTVNRNWYSDADVPASARQEGCQDIATQLISNMDIDVILGGGRKYMFRMGTPDPEYPDDYSQGGTRLDGKNLVQEWLAKRQGARYVWNRTELMQASLDPSVTHLMGLFEPGDMKYEIHRDSTLDPSLMEMTEAALRLLSRNPRGFFLFVEGGRIDHGHHESRAYRALTETIMFDDAIERAGQLTSEEDTLSLVTADHSHVFSFGGYPLRGSSIFGLAPGKARDRKAYTVLLYGNGPGYVLKDGARPDVTESESGSPEYRQQSAVPLDEETHAGEDVAVFARGPQAHLVHGVQEQTFIAHVMAFAACLEPYTACDLAPPAGTTDAAHPGRSVVPALLPLLAGTLLLLETATAP

SEQ ID NO: 109 - protein, 520 aa, Homo sapiens
MEFHNGGHVSGIGGFLVSLTSRMKPHTLAVTPALIFAITVATIGSFQFGYNTGVINAPETIIKEFINKTLTDKANAPPSEVLLTNLWSLSVAIFSVGGMIGSFSVGLFVNRFGRRNSMLIVNLLAATGGCLMGLCKIAESVEMLILGRLVIGLFCGLCTGFVPMYIGEISPTALRGAFGTLNQLGIVIGILVAQIFGLELILGSEELWPVLLGFTILPAILQSAALPCCPESPRFLLINRKKEENATRILQRLWGTQDVSQDIQEMKDESARMSQEKQVTVLELFRVSSYRQPIIISIVLQLSQQLSGINAVFYYSTGIFKDAGVQQPIYATISAGVVNTIFTLLSLFLVERAGRRTLHMIGLGGMAFCSTLMTVSLLLKNHYNGMSFVCIGAILVFVACFEIGPGPIPWFIVAELFSQGPRPAAMAVAGCSNWTSNFLVGLLFPSAAYYLGAYVFIIFTGFLITFLAFTFFKVPETRGRTFEDITRAFEGQAHGADRSGKDGVMGMNSIEPAKETTTNV

SEQ ID NO: 110 - protein, 221 aa, Homo sapiens
MLTLEDKDMKGFSWAIVPALTSLGYLIILVVSIFPFWVRLTNEESHEVFFSGLFENCFNAKCWKPRPLSIYIILGRVFLLSAVFLAFVTTFIMMPFASEFFPRTWKQNFVLACISFFTGACAFLALVLHALEIKALRMKLGPLQFSVLWPYYVLGFGIFLFIVAGTICLIQEMVCPCWHLLSTSQSMEEDHGSLYLDNLESLGGEPSSVQKETQVTAETVI

SEQ ID NO: 111 - protein, 538 aa, Homo sapiens
MGLLLLVLILTPSLAAYRHPDFPLLEKAQQLLQSTGSPYSTNCWLCTSSSTETPGTAYPASPREWTSIEAELHISYRWDPNLKGLMRPANSLLSTVKQDFPDIRQKPPIFGPIFTNINLMGIAPICVMAKRKNGTNVGTLPSTVCNVTFTVDSNQQTYQTYTHNQFRHQPRFPKPPNITFPQGTLLDKSSRFCQGRPSSCSTRNFWFRPADYNQCLQISNLSSTAEWVLLDQTRNSLFWENKTKGANQSQTPCVQVLAGMTIATSYLGISAVSEFFGTSLTPLFHFHISTCLKTQGAFYICGQSIHQCLPSNWTGTCTIGYVTPDIFIAPGNLSLPIPIYGNSPLPRVRRAIHFIPLLAGLGILAGTGTGIAGITKASLTYSQLSKEIANNIDTMAKALTTMQEQIDSLAAVVLQNRRGLDMLTAAQGGICLALDEKCCFWVNQSGKVQDNIRQLLNQASSLRERATQGWLNWEGTWKWFSWVLPLTGPLVSLLLLLLFGPCLLNLITQFVSSRLQAIKLQTNLSAGRHPRNIQESPF

SEQ ID NO: 112 - protein, 1017 aa, Homo sapiens
MVFSVRQCGHVGRTEEVLLTFKIFLVIICLHVVLVTSLEEDTDNSSLSPPPAKLSVVSFAPSSNGTPEVETTSLNDVTLSLLPSNETEKTKITIVKTFNASGVKPQRNICNLSSICNDSAFFRGEIMFQYDKESTVPQNQHITNGTLTGVLSLSELKRSELNKTLQTLSETYFIMCATAEAQSTLNCTFTIKLNNTMNACAVIAALERVKIRPMEHCCCSVRIPCPSSPEELEKLQCDLQDPIVCLADHPRGPPFSSSQSIPVVPRATVLSQVPKATSFAEPPDYSPVTHNVPSPIGEIQPLSPQPSAPIASSPAIDMPPQSETISSPMPQTHVSGTPPPVKASFSSPTVSAPANVNTTSAPPVQTDIVNTSSISDLENQVLQMEKALSLGSLEPNLAGEMINQVSRLLHSPPDMLAPLAQRLLKVVDDIGLQLNFSNTTISLTSPSLALAVIRVNASSFNTTTFVAQDPANLQVSLETQAPENSIGTITLPSSLMNNLPAHDMELASRVQFNFFETPALFQDPSLENLSLISYVISSSVANLTVRNLTRNVTVTLKHINPSQDELTVRCVFWDLGRNGGRGGWSDNGCSVKDRRLNETICTCSHLTSFGVLLDLSRTSVLPAQMMALTFITYIGCGLSSIFLSVTLVTYIAFEKIRRDYPSKILIQLCAALLLLNLVFLLDSWIALYKMQGLCISVAVFLHYFLLVSFTWMGLEAFHMYLALVKVFNTYIRKYILKFCIVGWGVPAVVVTIILTISPDNYGLGSYGKFPNGSPDDFCWINNNAVFYITVVGYFCVIFLLNVSMFIVVLVQLCRIKKKKQLGAQRKTSIQDLRSIAGLTFLLGITWGFAFFAWGPVNVTFMYLFAIFNTLQGFFIFIFYCVAKENVRKQWRRYLCCGKLRLAENSDWSKTATNGLKKQTVNQGVSSSSNSLQSSSNSTNSTTLLVNNDCSVHASGNGNASTERNGVSFSVQNGDVCLHDFTGKQHMFNEKEDSCNGKGRMALRRTSKRGSLHFIEQM

SEQ ID NO: 113 - protein, 775 aa, Homo sapiens
MEPPYSLTAHYDEFQEVKYVSRCGAGGARGASLPPGFPLGAARSATGARSGLPRWNRREVCLLSGLVFAAGLCAILAAMLALKYLGPVAAGGGACPEGCPERKAFARAARFLAANLDASIDPCQDFYSFACGGWLRRHAIPDDKLTYGTIAAIGEQNEERLRRLLARPGGGPGGAAQRKVRAFFRSCLDMREIERLGPRPMLEVIEDCGGWDLGGAEERPGVAARWDLNRLLYKAQGVYSAAALFSLTVSLDDRNSSRYVIRIDQDGLTLPERTLYLAQDEDSEKILAAYRVFMERVLSLLGADAVEQKAQEILQVEQQLANITVSEHDDLRRDVSSMYNKVTLGQLQKITPHLRWKWLLDQIFQEDFSEEEEVVLLATDYMQQVSQLIRSTPHRVLHNYLVWRVVVVLSEHLSPPFREALHELAQEMEGSDKPQELARVCLGQANRHFGMALGALFVHEHFSAASKAKVQQLVEDIKYILGQRLEELDWMDAETRAAARAKLQYMMVMVGYPDFLLKPDAVDKEYEFEVHEKTYFKNILNSIRFSIQLSVKKIRQEVDKSTWLLPPQALNAYYLPNKNQMVFPAGILQPTLYDPDFPQSLNYGGIGTIIGHELTHGYDDWGGQYDRSGNLLHWWTEASYSRFLRKAECIVRLYDNFTVYNQRVNGKHTLGENIADMGGLKLAYHAYQKWVREHGPEHPLPRLKYTHDQLFFIAFAQNWCIKRRSQSIYLQVLTDKHAPEHYRVLGSVSQFEEFGRAFHCPKDSPMNPAHKCSVW

SEQ ID NO: 114 - protein, 529 aa, Homo sapiens
MGPSCPVFLSFTKLSLWWLLLTPAGGEEAKRPPPRAPGDPLSSPSPTALPQGGSHTETEDRLFKHLFRGYNRWARPVPNTSDVVIVRFGLSIAQLIDVDEKNQMMTTNVWLKQEWSDYKLRWNPTDFGNITSLRVPSEMIWIPDIVLYNNADGEFAVTHMTKAHLFSTGTVHWVPPAIYKSSCSIDVTFFPFDQQNCKMKFGSWTYDKAKIDLEQMEQTVDLKDYWESGEWAIVNATGTYNSKKYDCCAEIYPDVTYAFVIRRLPLFYTINLIIPCLLISCLTVLVFYLPSDCGEKITLCISVLLSLTVFLLLITEIIPSTSLVIPLIGEYLLFTMIFVTLSIVITVFVLNVHHRSPSTHTMPHWVRGALLGCVPRWLLMNRPPPPVELCHPLRLKLSPSYHWLESNVDAEEREVVVEEEDRWACAGHVAPSVGTLCSHGHLHSGASGPKAEALLQEGELLLSPHMQKALEGVHYIADHLRSEDADSSVKEDWKYVAMVIDRIFLWLFIIVCFLGTIGLFLPPFLAGMI

SEQ ID NO: 115 - protein, 537 aa, Homo sapiens
MPHLMERMVGSGLLWLALVSCILTQASAVQRGYGNPIEASSYGLDLDCGAPGTPEAHVCFDPCQNYTLLDEPFRSTENSAGSQGCDKNMSGWYRFVGEGGVRMSETCVQVHRCQTDAPMWLNGTHPALGDGITNHTACAHWSGNCCFWKTEVLVKACPGGYHVYRLEGTPWCNLRYCTVPRDPSTVEDKCEKACRPEEECLALNSTWGCFCRQDLNSSDVHSLQPQLDCGPREIKVKVDKCLLGGLGLGEEVIAYLRDPNCSSILQTEERNWVSVTSPVQASACRNILERNQTHAIYKNTLSLVNDFIIRDTILNINFQCAYPLDMKVSLQAALQPIVSSLNVSVDGNGEFIVRMALFQDQNYTNPYEGDAVELSVESVLYVGAILEQGDTSRFNLVLRNCYATPTEDKADLVKYFIIRNSCSNQRDSTIHVEENGQSSESRFSVQMFMFAGHYDLVFLHCEIHLCDSLNEQCQPSCSRSQVRSEVPAIDLARVLDLGPITRRGAQSPGVMNGTPSTAGFLVAWPMVLLTVLLAWLF

SEQ ID NO: 116 - protein, 426 aa, Homo sapiens
MGPLPAPSCTQRITWKGLLLTASLLNFWNPPTTAEVTIEAQPPKVSEGKDVLLLVHNLPQNLPGYFWYKGEMTDLYHYIISYIVDGKIIIYGPAYSGRETVYSNASLLIQNVTRKDAGTYTLHIIKRGDETREEIRHFTFTLYLETPKPYISSSNLNPREAMEAVRLICDPETLDASYLWWMNGQSLPVTHRLQLSKTNRTLYLFGVTKYIAGPYECEIRNPVSASRSDPVTLNLLPKLPIPYITINNLNPRENKDVLAFTCEPKSENYTYIWWLNGQSLPVSPGVKRPIENRILILPSVTRNETGPYQCEIRDRYGGLRSNPVILNVLYGPDLPRIYPSFTYYRSGENLDLSCFTESNPPAEYFWTINGKFQQSGQKLFIPQITRNHSGLYACSVHNSATGKEISKSMTVKVSGPCHGDLTESQS

SEQ ID NO: 117 - protein, 328 aa, Homo sapiens
MEKSIWLLACLAWVLPTGSFVRTKIDTTENLLNTEVHSSPAQRWSMQVPPEVSAEAGDAAVLPCTFTHPHRHYDGPLTAIWRAGEPYAGPQVFRCAAARGSELCQTALSLHGRFRLLGNPRRNDLSLRVERLALADDRRYFCRVEFAGDVHDRYESRHGVRLHVTAAPRIVNISVLPSPAHAFRALCTAEGEPPPALAWSGPALGNSLAAVRSPREGHGHLVTAELPALTHDGRYTCTAANSLGRSEASVYLFRFHGASGASTVALLLGALGFKALLLLGVLAARAARRRPEHLDTPDTPPRSQAQESNYENLSQMNPRSPPATMCSP

SEQ ID NO: 118 - protein, 620 aa, Homo sapiens
MSKSKCSVGLMSSVVAPAKEPNAVGPKEVELILVKEQNGVQLTSSTLTNPRQSPVEAQDRETWGKKIDFLLSVIGFAVDLANVWRFPYLCYKNGGGAFLVPYLLFMVIAGMPLFYMELALGQFNREGAAGVWKICPILKGVGFTVILISLYVGFFYNVIIAWALHYLFSSFTTELPWIHCNNSWNSPNCSDAHPGDSSGDSSGLNDTFGTTPAAEYFERGVLHLHQSHGIDDLGPPRWQLTACLVLVIVLLYFSLWKGVKTSGKVVWITATMPYVVLTALLLRGVTLPGAIDGIRAYLSVDFYRLCEASVWIDAATQVCFSLGVGFGVLIAFSSYNKFTNNCYRDAIVTTSINSLTSFSSGFVVFSFLGYMAQKHSVPIGDVAKDGPGLIFIIYPEAIATLPLSSAWAVVFFIMLLTLGIDSAMGGMESVITGLIDEFQLLHRHRELFTLFIVLATFLLSLFCVTNGGIYVFTLLDHFAAGTSILFGVLIEAIGVAWFYGVGQFSDDIQQMTGQRPSLYWRLCWKLVSPCFLLFVVVVSIVTFRPPHYGAYIFPDWANALGWVIATSSMAMVPIYAAYKFCSLPGSFREKLAYAIAPEKDRELVDRGEVRQFTLRHWLKV

SEQ ID NO: 119 - protein, 398 aa, Homo sapiens
MHTVATSGPNASWGAPANASGCPGCGANASDGPVPSPRAVDAWLVPLFFAALMLLGLVGNSLVIYVICRHKPMRTVTNFYIANLAATDVTFLLCCVPFTALLYPLPGWVLGDFMCKFVNYIQQVSVQATCATLTAMSVDRWYVTVFPLRALHRRTPRLALAVSLSIWVGSAAVSAPVLALHRLSPGPRAYCSEAFPSRALERAFALYNLLALYLLPLLATCACYAAMLRHLGRVAVRPAPADSALQGQVLAERAGAVRAKVSRLVAAVVLLFAACWGPIQLFLVLQALGPAGSWHPRSYAAYALKTWAHCMSYSNSALNPLLYAFLGSHFRQAFRRVCPCAPRRPRRPRRPGPSDPAAPHAELLRLGSHPAPARAQKPGSSGLAARGLCVLGEDNAPL

SEQ ID NO: 120 - protein, 431 aa, Homo sapiens
MQALNITPEQFSRLLRDHNLTREQFIALYRLRPLVYTPELPGRAKLALVLTGVLIFALALFGNALVFYVVTRSKAMRTVTNIFICSLALSDLLITFFCIPVTMLQNISDNWLGGAFICKMVPFVQSTAVVTEILTMTCIAVERHQGLVHPFKMKWQYTNRRAFTMLGVVWLVAVIVGSPMWHVQQLEIKYDFLYEKEHICCLEEWTSPVHQKIYTTFILVILFLLPLMVMLILYSKIGYELWIKKRVGDGSVLRTIHGKEMSKIARKKKRAVIMMVTVVALFAVCWAPFHVVHMMIEYSNFEKEYDDVTIKMIFAIVQIIGFSNSICNPIVYAFMNENFKKNVLSAVCYCIVNKTFSPAQRHGNSGITMMRKKAKFSLRENPVEETKGEAFSDGNIEVKLCEQTEEKKKLKRHLALFRSELAENSPLDSGH

SEQ ID NO: 121 - protein, 335 aa, Homo sapiens
MESSFSFGVILAVLASLIIATNTLVAVAVLLLIHKNDGVSLCFTLNLAVADTLIGVAISGLLTDQLSSPSRPTQKTLCSLRMAFVTSSAAASVLTVMLITFDRYLAIKQPFRYLKIMSGFVAGACIAGLWLVSYLIGFLPLGIPMFQQTAYKGQCSFFAVFHPHFVLTLSCVGFFPAMLLFVFFYCDMLKIASMHSQQIRKMEHAGAMAGGYRSPRTPSDFKALRTVSVLIGSFALSWTPFLITGIVQVACQECHLYLVLERYLWLLGVGNSLLNPLIYAYWQKEVRLQLYHMALGVKKVLTSFLLFLSARNCGPERPRESSCHIVTISSSEFDG

SEQ ID NO: 122 - protein, 220 aa, Homo sapiens
MASAGMQILGVVLTLLGWVNGLVSCALPMWKVTAFIGNSIVVAQVVWEGLWMSCVVQSTGQMQCKVYDSLLALPQDLQAARALCVIALLVALFGLLVYLAGAKCTTCVEEKDSKARLVLTSGIVFVISGVLTLIPVCWTAHAIIRDFYNPLVAEAQKRELGASLYLGWAASGLLLLGGGLLCCTCPSGGSQGPSHYMARYSTSAPAISRGPSEYPTKNYV

SEQ ID NO: 123 - protein, 21 aa, Homo sapiens
MALPVTALLLPLALLLHAARP

SEQ ID NO: 124 - protein, 15 aa, Homo sapiens
GGGGSGGGGSGGGGS

SEQ ID NO: 125 - protein, 45 aa, Artificial Sequence
  Synthesized
TTTPAPRPPTPAPTIASQPLSLRPEACRPAAGGAVHTRGLDFACD

SEQ ID NO: 126 - protein, 23 aa, Artificial Sequence
  Synthesized
YIWAPLAGTCGVLLLSLVITLYC

SEQ ID NO: 127 - protein, 42 aa, Artificial Sequence; identical to SEQ ID NO: 3
  Synthesized

SEQ ID NO: 128 - protein, 112 aa, Artificial Sequence; identical to SEQ ID NO: 4
  Synthesized

SEQ ID NO: 129 - protein, 485 aa, Artificial Sequence
  Synthesized
MALPVTALLLPLALLLHAARPQIVLTQSPAIMSASLGERVTMTCTASSVVISTYLHWYQQKPGSSPKLWIYSTSNLASGVPVRFSGSGSGTSYSLTISSMEAEDAATYYCHQYHRSPWTFGGGTKLEIKGGGGSGGGGSGGGGSEVQLQQSGPELVKPGGSMKISCKASGYSFTGYTMNWVKQSHGKNLEWIGLINPYNGGISYNQKFKDKATLTMDKSSSTAYMELLSLTSEDSAIYFCARDYRYEGFDYWGQGTLVTVSATTTPAPRPPTPAPTIASQPLSLRPEACRPAAGGAVHTRGLDFACDIYIWAPLAGTCGVLLLSLVITLYCKRGRKKLLYIFKQPFMRPVQTTQEEDGCSCRFPEEEEGGCELRVKFSRSADAPAYKQGQNQLYNELNLGRREEYDVLDKRRGRDPEMGGKPRRKNPQEGLYNELQKDKMAEAYSEIGMKGERRRGKGHDGLYQGLSTATKDTYDALHMQALPPR

SEQ ID NO: 130 - protein, 241 aa, Artificial Sequence
  Synthesized
QIVLTQSPAIMSASLGERVTMTCTASSVVISTYLHWYQQKPGSSPKLWIYSTSNLASGVPVRFSGSGSGTSYSLTISSMEAEDAATYYCHQYHRSPWTFGGGTKLEIKGGGGSGGGGSGGGGSEVQLQQSGPELVKPGGSMKISCKASGYSFTGYTMNWVKQSHGKNLEWIGLINPYNGGISYNQKFKDKATLTMDKSSSTAYMELLSLTSEDSAIYFCARDYRYEGFDYWGQGTLVTVSA

SEQ ID NO: 131 - protein, 108 aa, Artificial Sequence
  Synthesized
QIVLTQSPAIMSASLGERVTMTCTASSVVISTYLHWYQQKPGSSPKLWIYSTSNLASGVPVRFSGSGSGTSYSLTISSMEAEDAATYYCHQYHRSPWTFGGGTKLEIK

SEQ ID NO: 132 - protein, 118 aa, Artificial Sequence
  Synthesized
EVQLQQSGPELVKPGGSMKISCKASGYSFTGYTMNWVKQSHGKNLEWIGLINPYNGGISYNQKFKDKATLTMDKSSSTAYMELLSLTSEDSAIYFCARDYRYEGFDYWGQGTLVTVSA

SEQ ID NO: 133 - protein, 488 aa, Artificial Sequence
  Synthesized
MALPVTALLLPLALLLHAARPENVLTQSPAIMSATLGEKVTMSCRATSNVKYMYWYQQKSGASPKLWIYYTSNLASGVPARFSGSGSGTSYSLTISSVEAADAATYYCQQFTSSPSTFGAGTKLELKGGGGSGGGGSGGGGSEVQLQQSGPELVKPGASVKISCKASGYSFTGYFMNWVKQSHGKSLEWIGRINPYNGDTFYNQKFKGKATLTVDKSSNTAHMELRSLTSEDSAVYYCARVLFLDFDDPYLMDYWGQGTSVTVSSTTTPAPRPPTPAPTIASQPLSLRPEACRPAAGGAVHTRGLDFACDIYIWAPLAGTCGVLLLSLVITLYCKRGRKKLLYIFKQPFMRPVQTTQEEDGCSCRFPEEEEGGCELRVKFSRSADAPAYKQGQNQLYNELNLGRREEYDVLDKRRGRDPEMGGKPRRKNPQEGLYNELQKDKMAEAYSEIGMKGERRRGKGHDGLYQGLSTATKDTYDALHMQALPPR

SEQ ID NO: 134 - protein, 244 aa, Artificial Sequence
  Synthesized
ENVLTQSPAIMSATLGEKVTMSCRATSNVKYMYWYQQKSGASPKLWIYYTSNLASGVPARFSGSGSGTSYSLTISSVEAADAATYYCQQFTSSPSTFGAGTKLELKGGGGSGGGGSGGGGSEVQLQQSGPELVKPGASVKISCKASGYSFTGYFMNWVKQSHGKSLEWIGRINPYNGDTFYNQKFKGKATLTVDKSSNTAHMELRSLTSEDSAVYYCARVLFLDFDDPYLMDYWGQGTSVTVSS

SEQ ID NO: 135 - protein, 106 aa, Artificial Sequence
  Synthesized
NVLTQSPAIMSATLGEKVTMSCRATSNVKYMYWYQQKSGASPKLWIYYTSNLASGVPARFSGSGSGTSYSLTISSVEAADAATYYCQQFTSSPSTFGAGTKLELKE

SEQ ID NO: 136 - protein, 123 aa, Artificial Sequence
  Synthesized
EVQLQQSGPELVKPGASVKISCKASGYSFTGYFMNWVKQSHGKSLEWIGRINPYNGDTFYNQKFKGKATLTVDKSSNTAHMELRSLTSEDSAVYYCARVLFLDFDDPYLMDYWGQGTSVTVSS

SEQ ID NO: 137 - protein, 485 aa, Artificial Sequence
  Synthesized
MALPVTALLLPLALLLHAARPDIQMTQSPASLSASVGETVTITCRASENIDSYLAWYQQKQGKSPQLLVYASTLLVDGVPSRFSGSRSGTQFSLKINSLQSEDVARYYCQHYYSIPYTFGSGTKLEIKGGGGSGGGGSGGGGSEVKLVESGGGLVKPGGSLKLSCAASGFTFNSYTMSWVRQTPAKRLEWVVTISSGGGRTYYPDSVKGRFTISRDNARNTLYLQMSSLRSEDTAMYYCIRGDYRYDGFAYWGQGTLVTVSTTTTPAPRPPTPAPTIASQPLSLRPEACRPAAGGAVHTRGLDFACDIYIWAPLAGTCGVLLLSLVITLYCKRGRKKLLYIFKQPFMRPVQTTQEEDGCSCRFPEEEEGGCELRVKFSRSADAPAYKQGQNQLYNELNLGRREEYDVLDKRRGRDPEMGGKPRRKNPQEGLYNELQKDKMAEAYSEIGMKGERRRGKGHDGLYQGLSTATKDTYDALHMQALPPR

SEQ ID NO: 138 - protein, 241 aa, Artificial Sequence
  Synthesized
DIQMTQSPASLSASVGETVTITCRASENIDSYLAWYQQKQGKSPQLLVYASTLLVDGVPSRFSGSRSGTQFSLKINSLQSEDVARYYCQHYYSIPYTFGSGTKLEIKGGGGSGGGGSGGGGSEVKLVESGGGLVKPGGSLKLSCAASGFTFNSYTMSWVRQTPAKRLEWVVTISSGGGRTYYPDSVKGRFTISRDNARNTLYLQMSSLRSEDTAMYYCIRGDYRYDGFAYWGQGTLVTVST

SEQ ID NO: 139 - protein, 107 aa, Artificial Sequence
  Synthesized
DIQMTQSPASLSASVGETVTITCRASENIDSYLAWYQQKQGKSPQLLVYASTLLVDGVPSRFSGSRSGTQFSLKINSLQSEDVARYYCQHYYSIPYTFGSGTKLEIK

SEQ ID NO: 140 - protein, 119 aa, Artificial Sequence
  Synthesized
EVKLVESGGGLVKPGGSLKLSCAASGFTFNSYTMSWVRQTPAKRLEWVVTISSGGGRTYYPDSVKGRFTISRDNARNTLYLQMSSLRSEDTAMYYCIRGDYRYDGFAYWGQGTLVTVST

SEQ ID NO: 141 - protein, 488 aa, Artificial Sequence
  Synthesized
MALPVTALLLPLALLLHAARPENVLTQSPAIMSATLGEKVTMSCRATSNVKYMYWYQQKSGASPKLWIYYTSNLASGVPARFSGSGSGTSYSLTISSVEAADAATYYCQQFTSSPSTFGAGTKLELKGGGGSGGGGSGGGGSEVQLQQSGPELVKPGASVKISCKASGYSFTGYFMNWVKQSHGKSLEWIGRINPYNGDTFYNQKFKGKATLTVDKSSSTAHMELRSLTSEDSAVYYCARVLFLDFDDPYLMDYWGQGTSVTVSSTTTPAPRPPTPAPTIASQPLSLRPEACRPAAGGAVHTRGLDFACDIYIWAPLAGTCGVLLLSLVITLYCKRGRKKLLYIFKQPFMRPVQTTQEEDGCSCRFPEEEEGGCELRVKFSRSADAPAYKQGQNQLYNELNLGRREEYDVLDKRRGRDPEMGGKPRRKNPQEGLYNELQKDKMAEAYSEIGMKGERRRGKGHDGLYQGLSTATKDTYDALHMQALPPR

SEQ ID NO: 142 - protein, 244 aa, Artificial Sequence
  Synthesized
ENVLTQSPAIMSATLGEKVTMSCRATSNVKYMYWYQQKSGASPKLWIYYTSNLASGVPARFSGSGSGTSYSLTISSVEAADAATYYCQQFTSSPSTFGAGTKLELKGGGGSGGGGSGGGGSEVQLQQSGPELVKPGASVKISCKASGYSFTGYFMNWVKQSHGKSLEWIGRINPYNGDTFYNQKFKGKATLTVDKSSSTAHMELRSLTSEDSAVYYCARVLFLDFDDPYLMDYWGQGTSVTVSS

SEQ ID NO: 143 - protein, 106 aa, Artificial Sequence
  Synthesized
ENVLTQSPAIMSATLGEKVTMSCRATSNVKYMYWYQQKSGASPKLWIYYTSNLASGVPARFSGSGSGTSYSLTISSVEAADAATYYCQQFTSSPSTFGAGTKLELK

SEQ ID NO: 144 - protein, 123 aa, Artificial Sequence
  Synthesized
EVQLQQSGPELVKPGASVKISCKASGYSFTGYFMNWVKQSHGKSLEWIGRINPYNGDTFYNQKFKGKATLTVDKSSSTAHMELRSLTSEDSAVYYCARVLFLDFDDPYLMDYWGQGTSVTVSS

SEQ ID NO: 145 - protein, 482 aa, Artificial Sequence
  Synthesized
MALPVTALLLPLALLLHAARPSSELTQDPAVSVALGQTVRITCRGDSLRKYYASWYQQKPRQAPQLVIYHKNNRASGIPDRFSGSISGNTASLTITGAQAEDEAAYFCNSRDTSGNYLVFGGGTKVTVLGGGGGSGGGGSGGGGSQLQLQESGPGLVKPSETLSLTCAVSGASISNWWSWVRQPPGKGLEWIGEVHHSGVTTYKPSLKSRVTISVDNSKNQLSLKLTSVTAADTAVYYCAREFADDAFDIWGRGTMVTVTTTPAPRPPTPAPTIASQPLSLRPEACRPAAGGAVHTRGLDFACDIYIWAPLAGTCGVLLLSLVITLYCKRGRKKLLYIFKQPFMRPVQTTQEEDGCSCRFPEEEEGGCELRVKFSRSADAPAYKQGQNQLYNELNLGRREEYDVLDKRRGRDPEMGGKPRRKNPQEGLYNELQKDKMAEAYSEIGMKGERRRGKGHDGLYQGLSTATKDTYDALHMQALPPR

SEQ ID NO: 146 - protein, 238 aa, Artificial Sequence
  Synthesized
SSELTQDPAVSVALGQTVRITCRGDSLRKYYASWYQQKPRQAPQLVIYHKNNRASGIPDRFSGSISGNTASLTITGAQAEDEAAYFCNSRDTSGNYLVFGGGTKVTVLGGGGGSGGGGSGGGGSQLQLQESGPGLVKPSETLSLTCAVSGASISNWWSWVRQPPGKGLEWIGEVHHSGVTTYKPSLKSRVTISVDNSKNQLSLKLTSVTAADTAVYYCAREFADDAFDIWGRGTMVTV

SEQ ID NO: 147 - protein, 109 aa, Artificial Sequence
  Synthesized
SSELTQDPAVSVALGQTVRITCRGDSLRKYYASWYQQKPRQAPQLVIYHKNNRASGIPDRFSGSISGNTASLTITGAQAEDEAAYFCNSRDTSGNYLVFGGGTKVTVLG

SEQ ID NO: 148 - protein, 114 aa, Artificial Sequence
  Synthesized
QLQLQESGPGLVKPSETLSLTCAVSGASISNWWSWVRQPPGKGLEWIGEVHHSGVTTYKPSLKSRVTISVDNSKNQLSLKLTSVTAADTAVYYCAREFADDAFDIWGRGTMVTV

SEQ ID NO: 149 - protein, 250 aa, Artificial Sequence
  Synthesized
DIVMTQSPLSLPVTPGEPASISCRSTKSLLHSNGNTYLYWYLQKPGQSPQLLIYRMSNLASGVPDRFSGSGSGTDFTLKISRVEAEDVGVYYCMQHLEYPFTFGGGTKVEIKGGGGSGGGGSGGGGSEIQLQQSGAEVKKPGSSVKVSCKASGYTFTDYDMHWVRQAPGQGLEWMGTIDPETGGTAYNQKFKGRVTITADKSTSTAYMELSSLRSEDTAVYYCTSFYYTYSNYDVGFAYWGQGTLVTVSS

SEQ ID NO: 150 - protein, 250 aa, Artificial Sequence
  Synthesized
DIVMTQSPLSLPVTPGEPASISCRSTKSLLHSNGNTYLYWYLQKPGQSPQLLIYRMSNLASGVPDRFSGSGSGTDFTLKISRVEAEDVGVYYCMQHLEYPFTFGGGTKVEIKGGGGSGGGGSGGGGSEIQLQQSGAEVKKPGSSVKVSCKASGYTFTDYDMHWVRQAPGQGLEWIGTIDPETGGTAYNQKFKGRATLTADRSTSTAYMELSSLRSEDTAVYYCTSFYYTYSNYDVGFAYWGQGTLVTVSS

SEQ ID NO: 151 - protein, 250 aa, Artificial Sequence
  Synthesized
DIVMTQSPLSLPVTPGEPASISCRSTKSLLHSNGNTYLYWYLQKPGQSPQLLIYRMSNLASGVPDRFSGSGSGTDFTLKISRVEAEDVGVYYCMQHLEYPFTFGGGTKVEIKGGGGSGGGGSGGGGSEIQLQQSGAEVKKPGSSVKVSCKASGYTFTDYDMHWVKQAPGQGLEWIGTIDPETGGTAYNQKFKGKATLTADRSTSTAYMELSSLRSEDTAVYYCTSFYYTYSNYDVGFAYWGQGTLVTVSS

SEQ ID NO: 152 - protein, 250 aa, Artificial Sequence
  Synthesized
DIVMTQSPLSLPVTPGEPASISCRSTKSLLHSNGNTYLYWYLQKPGQSPQLLIYRMSNLASGVPDRFSGSGSGTDFTLKISRVEAEDVGVYYCMQHLEYPFTFGGGTKVEIKGGGGSGGGGSGGGGSEIQLQQSGAEVKKPGSSVKVSCKASGYTFTDYDMHWVKQAPGHGLEWIGTIDPETGGTAYNQKFKGKATLTADRSTSTAYMELSSLTSEDTAVYYCTSFYYTYSNYDVGFAYWGQGTLVTVSS

SEQ ID NO: 153 - protein, 250 aa, Artificial Sequence
  Synthesized
DIVMTQSPLSLPVTPGEPASISCRSTKSLLHSNGNTYLYWFLQKPGQSPQLLIYRMSNLASGVPDRFSGSGSGTDFTLKISRVEAEDVGVYYCMQHLEYPFTFGGGTKVEIKGGGGSGGGGSGGGGSEIQLQQSGAEVKKPGSSVKVSCKASGYTFTDYDMHWVRQAPGQGLEWMGTIDPETGGTAYNQKFKGRVTITADKSTSTAYMELSSLRSEDTAVYYCTSFYYTYSNYDVGFAYWGQGTLVTVSS

SEQ ID NO: 154 - protein, 250 aa, Artificial Sequence
  Synthesized
DIVMTQSPLSLPVTPGEPASISCRSTKSLLHSNGNTYLYWFLQKPGQSPQLLIYRMSNLASGVPDRFSGSGSGTDFTLKISRVEAEDVGVYYCMQHLEYPFTFGGGTKVEIKGGGGSGGGGSGGGGSEIQLQQSGAEVKKPGSSVKVSCKASGYTFTDYDMHWVRQAPGQGLEWIGTIDPETGGTAYNQKFKGRATLTADRSTSTAYMELSSLRSEDTAVYYCTSFYYTYSNYDVGFAYWGQGTLVTVSS

SEQ ID NO: 155 - protein, 250 aa, Artificial Sequence
  Synthesized
DIVMTQSPLSLPVTPGEPASISCRSTKSLLHSNGNTYLYWFLQKPGQSPQLLIYRMSNLASGVPDRFSGSGSGTDFTLKISRVEAEDVGVYYCMQHLEYPFTFGGGTKVEIKGGGGSGGGGSGGGGSEIQLQQSGAEVKKPGSSVKVSCKASGYTFTDYDMHWVKQAPGQGLEWIGTIDPETGGTAYNQKFKGKATLTADRSTSTAYMELSSLRSEDTAVYYCTSFYYTYSNYDVGFAYWGQGTLVTVSS

SEQ ID NO: 156 - protein, 250 aa, Artificial Sequence
  Synthesized
DIVMTQSPLSLPVTPGEPASISCRSTKSLLHSNGNTYLYWFLQKPGQSPQLLIYRMSNLASGVPDRFSGSGSGTDFTLKISRVEAEDVGVYYCMQHLEYPFTFGGGTKVEIKGGGGSGGGGSGGGGSEIQLQQSGAEVKKPGSSVKVSCKASGYTFTDYDMHWVKQAPGHGLEWIGTIDPETGGTAYNQKFKGKATLTADRSTSTAYMELSSLTSEDTAVYYCTSFYYTYSNYDVGFAYWGQGTLVTVSS

SEQ ID NO: 157 - protein, 112 aa, Artificial Sequence
  Synthesized
DIVMTQSPLSLPVTPGEPASISCRSTKSLLHSNGNTYLYWYLQKPGQSPQLLIYRMSNLASGVPDRFSGSGSGTDFTLKISRVEAEDVGVYYCMQHLEYPFTFGGGTKVEIK

SEQ ID NO: 158 - protein, 112 aa, Artificial Sequence
  Synthesized
DIVMTQSPLSLPVTPGEPASISCRSTKSLLHSNGNTYLYWFLQKPGQSPQLLIYRMSNLASGVPDRFSGSGSGTDFTLKISRVEAEDVGVYYCMQHLEYPFTFGGGTKVEIK

SEQ ID NO: 159 - protein, 123 aa, Artificial Sequence
  Synthesized
EIQLQQSGAEVKKPGSSVKVSCKASGYTFTDYDMHWVRQAPGQGLEWMGTIDPETGGTAYNQKFKGRVTITADKSTSTAYMELSSLRSEDTAVYYCTSFYYTYSNYDVGFAYWGQGTLVTVSS

SEQ ID NO: 160 - protein, 123 aa, Artificial Sequence
  Synthesized
EIQLQQSGAEVKKPGSSVKVSCKASGYTFTDYDMHWVRQAPGQGLEWIGTIDPETGGTAYNQKFKGRATLTADRSTSTAYMELSSLRSEDTAVYYCTSFYYTYSNYDVGFAYWGQGTLVTVSS

SEQ ID NO: 161 - protein, 123 aa, Artificial Sequence
  Synthesized
EIQLQQSGAEVKKPGSSVKVSCKASGYTFTDYDMHWVKQAPGQGLEWIGTIDPETGGTAYNQKFKGKATLTADRSTSTAYMELSSLRSEDTAVYYCTSFYYTYSNYDVGFAYWGQGTLVTVSS

SEQ ID NO: 162 - protein, 123 aa, Artificial Sequence
  Synthesized
EIQLQQSGAEVKKPGSSVKVSCKASGYTFTDYDMHWVKQAPGHGLEWIGTIDPETGGTAYNQKFKGKATLTADRSTSTAYMELSSLTSEDTAVYYCTSFYYTYSNYDVGFAYWGQGTLVTVSS

SEQ ID NO: 163 - protein, 482 aa, Artificial Sequence
  Synthesized
MALPVTALLLPLALLLHAARPDIQMTQSPSSLSASVGDRVTITCKASDLIHNWLAWYQQKPGKAPKLLIYGATSLETGVPSRFSGSGSGTDFTLTISSLQPEDFATYYCQQYWTTPFTFGQGTKVEIKGGGGSGGGGSGGGGSEVQLVESGGGLVQPGGSLRLSCAASGYSITNDYAWNWVRQAPGKGLEWVGYISYSGYTTYNPSLKSRFTISRDTSKNTLYLQMNSLRAEDTAVYYCARWTSGLDYWGQGTLVTVSSTTTPAPRPPTPAPTIASQPLSLRPEACRPAAGGAVHTRGLDFACDIYIWAPLAGTCGVLLLSLVITLYCKRGRKKLLYIFKQPFMRPVQTTQEEDGCSCRFPEEEEGGCELRVKFSRSADAPAYKQGQNQLYNELNLGRREEYDVLDKRRGRDPEMGGKPRRKNPQEGLYNELQKDKMAEAYSEIGMKGERRRGKGHDGLYQGLSTATKDTYDALHMQALPPR

SEQ ID NO: 164 - protein, 238 aa, Artificial Sequence
  Synthesized
DIQMTQSPSSLSASVGDRVTITCKASDLIHNWLAWYQQKPGKAPKLLIYGATSLETGVPSRFSGSGSGTDFTLTISSLQPEDFATYYCQQYWTTPFTFGQGTKVEIKGGGGSGGGGSGGGGSEVQLVESGGGLVQPGGSLRLSCAASGYSITNDYAWNWVRQAPGKGLEWVGYISYSGYTTYNPSLKSRFTISRDTSKNTLYLQMNSLRAEDTAVYYCARWTSGLDYWGQGTLVTVSS

SEQ ID NO: 165 - protein, 107 aa, Artificial Sequence
  Synthesized
DIQMTQSPSSLSASVGDRVTITCKASDLIHNWLAWYQQKPGKAPKLLIYGATSLETGVPSRFSGSGSGTDFTLTISSLQPEDFATYYCQQYWTTPFTFGQGTKVEIK

SEQ ID NO: 166 - protein, 116 aa, Artificial Sequence
  Synthesized
EVQLVESGGGLVQPGGSLRLSCAASGYSITNDYAWNWVRQAPGKGLEWVGYISYSGYTTYNPSLKSRFTISRDTSKNTLYLQMNSLRAEDTAVYYCARWTSGLDYWGQGTLVTVSS

SEQ ID NO: 167 - protein, 482 aa, Artificial Sequence
  Synthesized
MALPVTALLLPLALLLHAARPDIQMTQSSSFLSVSLGGRVTITCKASDLIHNWLAWYQQKPGNAPRLLISGATSLETGVPSRFSGSGSGNDYTLSIASLQTEDAATYYCQQYWTTPFTFGSGTKVEIKGGGGSGGGGSGGGGSDVQLQESGPGLVNPSQSLSLTCTVTGYSITNDYAWNWIRQFPGNKLEWMGYINYSGYTTYNPSLKSRISITRDTSKNQFFLHLNSVTTEDTATYYCARWDGGLTYWGQGTLVTVSATTTPAPRPPTPAPTIASQPLSLRPEACRPAAGGAVHTRGLDFACDIYIWAPLAGTCGVLLLSLVITLYCKRGRKKLLYIFKQPFMRPVQTTQEEDGCSCRFPEEEEGGCELRVKFSRSADAPAYKQGQNQLYNELNLGRREEYDVLDKRRGRDPEMGGKPRRKNPQEGLYNELQKDKMAEAYSEIGMKGERRRGKGHDGLYQGLSTATKDTYDALHMQALPPR

SEQ ID NO: 168 - protein, 238 aa, Artificial Sequence
  Synthesized
DIQMTQSSSFLSVSLGGRVTITCKASDLIHNWLAWYQQKPGNAPRLLISGATSLETGVPSRFSGSGSGNDYTLSIASLQTEDAATYYCQQYWTTPFTFGSGTKVEIKGGGGSGGGGSGGGGSDVQLQESGPGLVNPSQSLSLTCTVTGYSITNDYAWNWIRQFPGNKLEWMGYINYSGYTTYNPSLKSRISITRDTSKNQFFLHLNSVTTEDTATYYCARWDGGLTYWGQGTLVTVSA

SEQ ID NO: 169 - protein, 107 aa, Artificial Sequence
  Synthesized
DIQMTQSSSFLSVSLGGRVTITCKASDLIHNWLAWYQQKPGNAPRLLISGATSLETGVPSRFSGSGSGNDYTLSIASLQTEDAATYYCQQYWTTPFTFGSGTKVEIK

SEQ ID NO: 170 - protein, 116 aa, Artificial Sequence
  Synthesized
DVQLQESGPGLVNPSQSLSLTCTVTGYSITNDYAWNWIRQFPGNKLEWMGYINYSGYTTYNPSLKSRISITRDTSKNQFFLHLNSVTTEDTATYYCARWDGGLTYWGQGTLVTVSA

SEQ ID NO: 171 - protein, 298 aa, Artificial Sequence
  Synthesized
MALPVTALLLPLALLLHAARPGTSLSPPPESSGSPQQPGLSAPHSRQIPAPQGAVLVQREKDLPNYNWNSFGLRFTTTPAPRPPTPAPTIASQPLSLRPEACRPAAGGAVHTRGLDFACDIYIWAPLAGTCGVLLLSLVITLYCKRGRKKLLYIFKQPFMRPVQTTQEEDGCSCRFPEEEEGGCELRVKFSRSADAPAYKQGQNQLYNELNLGRREEYDVLDKRRGRDPEMGGKPRRKNPQEGLYNELQKDKMAEAYSEIGMKGERRRGKGHDGLYQGLSTATKDTYDALHMQALPPR

SEQ ID NO: 172 - protein, 54 aa, Artificial Sequence
  Synthesized
GTSLSPPPESSGSPQQPGLSAPHSRQIPAPQGAVLVQREKDLPNYNWNSFGLRF

SEQ ID NO: 173 - protein, 19 aa, Artificial Sequence
  Synthesized
GTTGCTCCAGGCCACAGCA

SEQ ID NO: 174 - protein, 7 aa, Artificial Sequence
  Synthesized
QSGDLTR

SEQ ID NO: 175 - protein, 7 aa, Artificial Sequence
  Synthesized
QWGTRYR

SEQ ID NO: 176 - protein, 7 aa, Artificial Sequence
  Synthesized
ERGTLAR

SEQ ID NO: 177 - protein, 7 aa, Artificial Sequence
  Synthesized
RSDNLRE

SEQ ID NO: 178 - protein, 7 aa, Artificial Sequence
  Synthesized
QSGDLTR

SEQ ID NO: 179 - protein, 7 aa, Artificial Sequence
  Synthesized
TSGALTR

SEQ ID NO: 180 - protein, 12 aa, Artificial Sequence
  Synthesized
GACTTTGCATGT

SEQ ID NO: 181 - protein, 7 aa, Artificial Sequence
  Synthesized
WRSSLAS

SEQ ID NO: 182 - protein, 7 aa, Artificial Sequence
  Synthesized
QSGSLTR

SEQ ID NO: 183 - protein, 7 aa, Artificial Sequence
  Synthesized
HKWVLRQ

SEQ ID NO: 184 - protein, 7 aa, Artificial Sequence
  Synthesized
DRSNLTR

SEQ ID NO: 185 - protein, 293 aa, Artificial Sequence
  Synthesized
MQRISSLIHLSLFWAGVMSAIELVPEHQTVPVSIGVPATLRCSMKGEAIGNYYINWYRKTQGNTITFIYREKDIYGPGFKDNFQGDIDIAKNLAVLKILAPSERDEGSYYCACDTMGHPRGKLIFGKGTRVTVEPRSQPHTKPSVFVMKNGTNVACLVKEFYPKDIRINLVSSKKITEFDPAIVISPSGKYNAVKLGKYEDSNSVTCSVQHDNKTVHSTDFEVKTDSTDHVKPKETENTKQPSKSCHKPKAIVHTEKVNMMSLTVLGLRMLFAKTVAVNFLLTAKLFFLTRDC

SEQ ID NO: 186 - protein, 315 aa, Artificial Sequence
  Synthesized
MVSLLHASTLAVLGALCVYGAGHLEQPQISSTKTLSKTARLECVVSGITISATSVYWYRERPGEVIQFLVSISYDGTVRKESGIPSGKFEVDRIPETSTSTLTIHNVEKQDIATYYCALWEAQQELGKKIKVFGPGTKLIITDKQLDADVSPKPTIFLPSIAETKLQKAGTYLCLLEKFFPDVIKIHWEEKKSNTILGSQEGNTMKTNDTYMKFSWLTVPEKSLDKEHRCIVRHENNKNGVDQEIIFPPIKTDVITMDPKDNCSKDANDTLLLQLTNTSAYYMYLLLLLKSVVYFAIITCCLLRRTAFCCNGEKS

SEQ ID NO: 187 - protein, 292 aa, Artificial Sequence
  Synthesized
MERISSLIHLSLFWAGVMSAIELVPEHQTVPVSIGVPATLRCSMKGEAIGNYYINWYRKTQGNTMTFIYREKDIYGPGFKDNFQGDIDIAKNLAVLKILAPSERDEGSYYCACDTLGMGGEYTDKLIFGKGTRVTVEPRSQPHTKPSVFVMKNGTNVACLVKEFYPKDIRINLVSSKKITEFDPAIVISPSGKYNAVKLGKYEDSNSVTCSVQHDNKTVHSTDFEVKTDSTDHVKPKETENTKQPSKSCHKPKAIVHTEKVNMMSLTVLGLRMLFAKTVAVNFLLTAKLFFL

SEQ ID NO: 188 - protein, 313 aa, Artificial Sequence
  Synthesized
MVSLLHASTLAVLGALCVYGAGHLEQPQISSTKTLSKTARLECVVSGITISATSVYWYRERPGEVIQFLVSISYDGTVRKESGIPSGKFEVDRIPETSTSTLTIHNVEKQDIATYYCALWEWELGKKIKVFGPGTKLIITDKQLDADVSPKPTIFLPSIAETKLQKAGTYLCLLEKFFPDVIKIHWEEKKSNTILGSQEGNTMKTNDTYMKFSWLTVPEKSLDKEHRCIVRHENNKNGVDQEIIFPPIKTDVITMDPKDNCSKDANDTLLLQLTNTSAYYMYLLLLLKSVVYFAIITCCLLRRTAFCCNGEKS

SEQ ID NO: 189 - protein, 288 aa, Artificial Sequence
  Synthesized
MERISSLIHLSLFWAGVMSAIELVPEHQTVPVSIGVPATLRCSMKGEAIGNYYINWYRKTQGNTMTFIYREKDIYGPGFKDNFQGDIDIAKNLAVLKILAPSERDEGSYYCACDTLVSTDKLIFGKGTRVTVEPRSQPHTKPSVFVMKNGTNVACLVKEFYPKDIRINLVSSKKITEFDPAIVISPSGKYNAVKLGKYEDSNSVTCSVQHDNKTVHSTDFEVKTDSTDHVKPKETENTKQPSKSCHKPKAIVHTEKVNMMSLTVLGLRMLFAKTVAVNFLLTAKLFFL

SEQ ID NO: 190 - protein, 314 aa, Artificial Sequence
  Synthesized
MVSLLHASTLAVLGALCVYGAGHLEQPQISSTKTLSKTARLECVVSGITISATSVYWYRERPGEVIQFLVSISYDGTVRKESGIPSGKFEVDRIPETSTSTLTIHNVEKQDIATYYCALWEVGELGKKIKVFGPGTKLIITDKQLDADVSPKPTIFLPSIAETKLQKAGTYLCLLEKFFPDVIKIHWEEKKSNTILGSQEGNTMKTNDTYMKFSWLTVPEKSLDKEHRCIVRHENNKNGVDQEIIFPPIKTDVITMDPKDNCSKDANDTLLLQLTNTSAYYMYLLLLLKSVVYFAIITCCLLRRTAFCCNGEKS

SEQ ID NO: 191 - protein, 291 aa, Artificial Sequence
  Synthesized
MERISSLIHLSLFWAGVMSAIELVPEHQTVPVSIGVPATLRCSMKGEAIGNYYINWYRKTQGNTMTFIYREKDIYGPGFKDNFQGDIDIAKNLAVLKILAPSERDEGSYYCACDTVAHGGGTDKLIFGKGTRVTVEPRSQPHTKPSVFVMKNGTNVACLVKEFYPKDIRINLVSSKKITEFDPAIVISPSGKYNAVKLGKYEDSNSVTCSVQHDNKTVHSTDFEVKTDSTDHVKPKETENTKQPSKSCHKPKAIVHTEKVNMMSLTVLGLRMLFAKTVAVNFLLTAKLFFL

SEQ ID NO: 192 - protein, 313 aa, Artificial Sequence; identical to SEQ ID NO: 188
  Synthesized

SEQ ID NO: 193 - protein, 291 aa, Artificial Sequence
  Synthesized
MERISSLIHLSLFWAGVMSAIELVPEHQTVPVSIGVPATLRCSMKGEAIGNYYINWYRKTQGNTMTFIYREKDIYGPGFKDNFQGDIDIAKNLAVLKILAPSERDEGSYYCACDNLSTGGYTDKLIFGKGTRVTVEPRSQPHTKPSVFVMKNGTNVACLVKEFYPKDIRINLVSSKKITEFDPAIVISPSGKYNAVKLGKYEDSNSVTCSVQHDNKTVHSTDFEVKTDSTDHVKPKETENTKQPSKSCHKPKAIVHTEKVNMMSLTVLGLRMLFAKTVAVNFLLTAKLFFL

SEQ ID NO: 194 - protein, 316 aa, Artificial Sequence
  Synthesized
MVSLLHASTLAVLGALCVYGAGHLEQPQISSTKTLSKTARLECVVSGITISATSVYWYRERPGEVIQFLVSISYDGTVRKESGIPSGKFEVDRIPETSTSTLTIHNVEKQDIATYYCALWEVYQGELGKKIKVFGPGTKLIITDKQLDADVSPKPTIFLPSIAETKLQKAGTYLCLLEKFFPDVIKIHWEEKKSNTILGSQEGNTMKTNDTYMKFSWLTVPEKSLDKEHRCIVRHENNKNGVDQEIIFPPIKTDVITMDPKDNCSKDANDTLLLQLTNTSAYYMYLLLLLKSVVYFAIITCCLLRRTAFCCNGEKS

SEQ ID NO: 195 - protein, 291 aa, Artificial Sequence
  Synthesized
MERISSLIHLSLFWAGVMSAIELVPEHQTVPVSIGVPATLRCSMKGEAIGNYYINWYRKTQGNTMTFIYREKDIYGPGFKDNFQGDIDIAKNLAVLKILAPSERDEGSYYCACDILGEKPYTDKLIFGKGTRVTVEPRSQPHTKPSVFVMKNGTNVACLVKEFYPKDIRINLVSSKKITEFDPAIVISPSGKYNAVKLGKYEDSNSVTCSVQHDNKTVHSTDFEVKTDSTDHVKPKETENTKQPSKSCHKPKAIVHTEKVNMMSLTVLGLRMLFAKTVAVNFLLTAKLFFL

SEQ ID NO: 196 - DNA, 339 bp, Artificial Sequence; identical to SEQ ID NO: 41
  Synthesized

SEQ ID NO: 197 - protein, 276 aa, Artificial Sequence
  Synthesized
MKKHLTTFLVILWLYFYRGNGKNQVEQSPQSLIILEGKNCTLQCNYTVSPFSNLRWYKQDTGRGPVSLTIMTFSENTKSNGRYTATLDADTKQSSLHITASQLSDSASYICVVSDRGSTLGRLYFGRGTQLTVWPDIQNPDPAVYQLRDSKSSDKSVCLFTDFDSQTNVSQSKDSDVYITDKTVLDMRSMDFKSNSAVAWSNKSDFACANAFNNSIIPEDTFFPSPESSCDVKLVEKSFETDTNLNFQNLSVIGFRILLLKVAGFNLLMTLRLWSS

SEQ ID NO: 198 - protein, 313 aa, Artificial Sequence
  Synthesized
MTIRLLCYVGFYFLGAGLMEADIYQTPRYLVIGTGKKITLECSQTMGHDKMYWYQQDPGMELHLIHYSYGVNSTEKGDLSSESTVSRIRTEHFPLTLESARPSHTSQYLCASSGLRDRGLYEQYFGPGTRLTVTEDLKNVFPPEVAVFEPSEAEISHTQKATLVCLATGFYPDHVELSWWVNGKEVHSGVSTDPQPLKEQPALNDSRYCLSSRLRVSATFWQNPRNHFRCQVQFYGLSENDEWTQDRAKPVTQIVSAEAWGRADCGFTSESYQQGVLSATILYEILLGKATLYAVLVSALVLMAMVKRKDSRG

SEQ ID NO: 199 - protein, 267 aa, Artificial Sequence
  Synthesized
MWGVFLLYVSMKMGGTTGQNIDQPTEMTATEGAIVQINCTYQTSGFNGLFWYQQHAGEAPTFLSYNVLDGLEEKGRFSSFLSRSKGYSYLLLKELQMKDSASYLCAVKDSNYQLIWGAGTKLIIKPNIQNPDPAVYQLRDSKSSDKSVCLFTDFDSQTNVSQSKDSDVYITDKTVLDMRSMDFKSNSAVAWSNKSDFACANAFNNSIIPEDTFFPSPESSCDVKLVEKSFETDTNLNFQNLSVIGFRILLLKVAGFNLLMTLRLWSS

SEQ ID NO: 200 - protein, 138 aa, Artificial Sequence
  Synthesized
MAVLVLLLCLLIFPSCVLSQVQLKESGPGLVQPSQTLSLTCTVSGSSLTSNSVSWIRQPPGKGLEWMGVIWSNGDADYNSAIKSRLSISRDTSKSQVFLKMNSLQTEDTAMYFCASPYYGYYFPFDYWGQGVMVTVSS

SEQ ID NO: 201 - DNA, 3533 bp, Artificial Sequence
  Synthesized
atggccttaccagtgaccgccttgctcctgccgctggccttgctgctccacgccgccaggccggatattgtgatgacccagtccccgtcctccctgaccgtgaccgcgggcgaaaaagtgaccatgatttgcaaatcctcccagtccctgctgaattccggcgatcagaaaaattatctgacctggtatcagcagaaaccgggccagccgccgaaactgctgattttttgggcgtccacccgtgaatccggcgtgccggatcgttttaccggctccggctccggcaccgattttaccctgaccatttcctccgtgcaggcggaagatctggcggtgtattattgccagaatgattattcctatccgctgacctttggcgcgggcaccaaactggaactgaaaggcggcggcggctccggcggcggcggctccggcggcggcggctcccaggtgcagctgcagcagtccgatgcggaactggtgaaaccgggctcctccgtgaaaatttcctgcaaagcgtccggctatacctttaccgatcatgcgattcattgggtgaaacagaaaccggaacagggcctggaatggattggccatttttccccgggcaataccgatattaaatataatgataaatttaaaggcaaagcgaccctgaccgtggatcgttcctcctccaccgcgtatatgcagctgaattccctgacctccgaagattccgcggtgtatttttgcaaaacctccacctttttttttgattattggggccagggcaccaccctgaccgtgtcctccaccacgacgccagcgccgcgaccaccaacaccggcgcccaccatcgcgtcgcagcccctgtccctgcgcccagaggcgtgccggccagcggcggggggcgcagtgcacacgagggggctggacttcgcctgtgatatctacatctgggcgcccttggccgggacttgtggggtccttctcctgtcactggttatcaccctttactgcaaacggggcagaaagaaactcctgtatatattcaaacaaccatttatgagaccagtacaaactactcaagaggaagatggctgtagctgccgatttccagaagaagaagaaggaggatgtgaactgagagtgaagttcagcaggagcgcagacgcccccgcgtacaagcagggccagaaccagctctataacgagctcaatctaggacgaagagaggagtacgatgttttggacaagaggcgtggccgggaccctgagatggggggaaagccgagaaggaagaaccctcaggaaggcctgtacaatgaactgcagaaagataagatggcggaggcctacagtgagattgggatgaaaggcgagcgccggaggggcaaggggcacgatggcctttaccagggtctcagtacagccaccaaggacacctacgacgcccttcacatgcaggccctgccccctcgctaatctagaggcgcgcccctctccctcccccccccctaacgttactggccgaagccgcttggaataaggccggtgtgcgtttgtctatatgttattttccaccatattgccgtcttttggcaatgtgagggcccggaaacctggccctgtcttcttgacgagcattcctaggggtctttcccctctcgccaaaggaatgcaaggtctgttgaatgtcgtgaaggaagcagttcctctggaagcttcttgaagacaaacaacgtctgtagcgaccctttgcaggcagcggaaccccccacctggcgacaggtgcctctgcggccaaaagccacgtgtataagatacacctgcaaaggcggcacaaccccagtgccacgttgtgagttggatagttgtggaaagagtcaaatggctctcctcaagcgtattcaacaaggggctgaaggatgcccagaaggtaccccattgtatgggatctgatctggggcctcggtacacatgctttacatgtgtttagtcgaggttaaaaaaacgtctaggccccccgaaccacggggacgtggttttcctttgaaaaacacgatgataatatggccacaacccatatgatggccttaccagtgaccgccttgctcctgccgctggccttgctgctccacgccgccaggccggacatccagatgacacagactacatcctccctgtctgcctctctgggagacagagtcaccatcagttgcagggcaagtcaggacattagtaaatatttaaattggtatcagcagaaaccagatggaactgttaaactcctgatctaccatacatcaagattacactcaggagtcccatcaaggttcagtggcagtgggtctggaacagattattctctcaccattagcaacctggagcaagaagatattgccacttacttttgccaacagggtaatacgcttccgtacacgttcggaggggggaccaagctggagatcacaggtggcggtggctcgggcggtggtgggtcgggtggcggcggatctgaggtgaaactgcaggagtcaggacctggcctggtggcgccctcacagagcctgtccgtcacatgcactgtctcaggggtctcattacccgactatggtgtaagctggattcgccagcctccacgaaagggtctggagtggctgggagtaatatggggtagtgaaaccacatactataattcagctctcaaatccagactgaccatcatcaaggacaactccaagagccaagttttcttaaaaatgaacagtctgcaaactgatgacacagccatttactactgtgccaaacattattactacggtggtagctatgctatggactactggggccaaggaacctcagtcaccgtctcctcaaccacgacgccagcgccgcgaccaccaacaccggcgcccaccatcgcgtcgcagcccctgtccctgcgcccagaggcgtgccggccagcggcggggggcgcagtgcacacgagggggctggacttcgcctgtgatatctacatctgggcgcccttggccgggacttgtggggtccttctcctgtcactggttatcaccctttactgcaaacggggcagaaagaaactcctgtatatattcaaacaaccatttatgagaccagtacaaactactcaagaggaagatggctgtagctgccgatttccagaagaagaagaaggaggatgtgaactgagagtgaagttcagcaggagcgcagacgcccccgcgtacaagcagggccagaaccagctctataacgagctcaatctaggacgaagagaggagtacgatgttttggacaagaggcgtggccgggaccctgagatggggggaaagccgagaaggaagaaccctcaggaaggcctgtacaatgaactgcagaaagataagatggcggaggcctacagtgagattgggatgaaaggcgagcgccggaggggcaaggggcacgatggcctttaccagggtctcagtacagccaccaaggacacctacgacgcccttcacatgcaggccctgccccctcgctaa

SEQ ID NO: 202 - protein, 488 aa, Artificial Sequence
  Synthesized
MALPVTALLLPLALLLHAARPDIVMTQSPSSLTVTAGEKVTMICKSSQSLLNSGDQKNYLTWYQQKPGQPPKLLIFWASTRESGVPDRFTGSGSGTDFTLTISSVQAEDLAVYYCQNDYSYPLTFGAGTKLELKGGGGSGGGGSGGGGSQVQLQQSDAELVKPGSSVKISCKASGYTFTDHAIHWVKQKPEQGLEWIGHFSPGNTDIKYNDKFKGKATLTVDRSSSTAYMQLNSLTSEDSAVYFCKTSTFFFDYWGQGTTLTVSSTTTPAPRPPTPAPTIASQPLSLRPEACRPAAGGAVHTRGLDFACDIYIWAPLAGTCGVLLLSLVITLYCKRGRKKLLYIFKQPFMRPVQTTQEEDGCSCRFPEEEEGGCELRVKFSRSADAPAYQQGQNQLYNELNLGRREEYDVLDKRRGRDPEMGGKPRRKNPQEGLYNELQKDKMAEAYSEIGMKGERRRGKGHDGLYQGLSTATKDTYDALHMQALPPR

SEQ ID NO: 203 - protein, 486 aa, Artificial Sequence
  Synthesized
MALPVTALLLPLALLLHAARPDIQMTQTTSSLSASLGDRVTISCRASQDISKYLNWYQQKPDGTVKLLIYHTSRLHSGVPSRFSGSGSGTDYSLTISNLEQEDIATYFCQQGNTLPYTFGGGTKLEITGGGGSGGGGSGGGGSEVKLQESGPGLVAPSQSLSVTCTVSGVSLPDYGVSWIRQPPRKGLEWLGVIWGSETTYYNSALKSRLTIIKDNSKSQVFLKMNSLQTDDTAIYYCAKHYYYGGSYAMDYWGQGTSVTVSSTTTPAPRPPTPAPTIASQPLSLRPEACRPAAGGAVHTRGLDFACDIYIWAPLAGTCGVLLLSLVITLYCKRGRKKLLYIFKQPFMRPVQTTQEEDGCSCRFPEEEEGGCELRVKFSRSADAPAYQQGQNQLYNELNLGRREEYDVLDKRRGRDPEMGGKPRRKNPQEGLYNELQKDKMAEAYSEIGMKGERRRGKGHDGLYQGLSTATKDTYDALHMQALPPR

SEQ ID NO: 204 - DNA, 3524 bp, Artificial Sequence
  Synthesized
atggccttaccagtgaccgccttgctcctgccgctggccttgctgctccacgccgccaggccggatattgtgatgacccagtccccgtcctccctgaccgtgaccgcgggcgaaaaagtgaccatgatttgcaaatcctcccagtccctgctgaattccggcgatcagaaaaattatctgacctggtatcagcagaaaccgggccagccgccgaaactgctgattttttgggcgtccacccgtgaatccggcgtgccggatcgttttaccggctccggctccggcaccgattttaccctgaccatttcctccgtgcaggcggaagatctggcggtgtattattgccagaatgattattcctatccgctgacctttggcgcgggcaccaaactggaactgaaaggcggcggcggctccggcggcggcggctccggcggcggcggctcccaggtgcagctgcagcagtccgatgcggaactggtgaaaccgggctcctccgtgaaaatttcctgcaaagcgtccggctatacctttaccgatcatgcgattcattgggtgaaacagaaaccggaacagggcctggaatggattggccatttttccccgggcaataccgatattaaatataatgataaatttaaaggcaaagcgaccctgaccgtggatcgttcctcctccaccgcgtatatgcagctgaattccctgacctccgaagattccgcggtgtatttttgcaaaacctccacctttttttttgattattggggccagggcaccaccctgaccgtgtcctccaccacgacgccagcgccgcgaccaccaacaccggcgcccaccatcgcgtcgcagcccctgtccctgcgcccagaggcgtgccggccagcggcggggggcgcagtgcacacgagggggctggacttcgcctgtgatatctacatctgggcgcccttggccgggacttgtggggtccttctcctgtcactggttatcaccaaacggggcagaaagaaactcctgtatatattcaaacaaccatttatgagaccagtacaaactactcaagaggaagatggctgtagctgccgatttccagaagaagaagaaggaggatgtgaactgagagtgaagttcagcaggagcgcagacgcccccgcgtacaagcagggccagaaccagctctataacgagctcaatctaggacgaagagaggagtacgatgttttggacaagaggcgtggccgggaccctgagatggggggaaagccgagaaggaagaaccctcaggaaggcctgtacaatgaactgcagaaagataagatggcggaggcctacagtgagattgggatgaaaggcgagcgccggaggggcaaggggcacgatggcctttaccagggtctcagtacagccaccaaggacacctacgacgcccttcacatgcaggccctgccccctcgctaatctagaggcgcgcccctctccctcccccccccctaacgttactggccgaagccgcttggaataaggccggtgtgcgtttgtctatatgttattttccaccatattgccgtcttttggcaatgtgagggcccggaaacctggccctgtcttcttgacgagcattcctaggggtctttcccctctcgccaaaggaatgcaaggtctgttgaatgtcgtgaaggaagcagttcctctggaagcttcttgaagacaaacaacgtctgtagcgaccctttgcaggcagcggaaccccccacctggcgacaggtgcctctgcggccaaaagccacgtgtataagatacacctgcaaaggcggcacaaccccagtgccacgttgtgagttggatagttgtggaaagagtcaaatggctctcctcaagcgtattcaacaaggggctgaaggatgcccagaaggtaccccattgtatgggatctgatctggggcctcggtacacatgctttacatgtgtttagtcgaggttaaaaaaacgtctaggccccccgaaccacggggacgtggttttcctttgaaaaacacgatgataatatggccacaacccatatgatggccttaccagtgaccgccttgctcctgccgctggccttgctgctccacgccgccaggccggacatccagatgacacagactacatcctccctgtctgcctctctgggagacagagtcaccatcagttgcagggcaagtcaggacattagtaaatatttaaattggtatcagcagaaaccagatggaactgttaaactcctgatctaccatacatcaagattacactcaggagtcccatcaaggttcagtggcagtgggtctggaacagattattctctcaccattagcaacctggagcaagaagatattgccacttacttttgccaacagggtaatacgcttccgtacacgttcggaggggggaccaagctggagatcacaggtggcggtggctcgggcggtggtgggtcgggtggcggcggatctgaggtgaaactgcaggagtcaggacctggcctggtggcgccctcacagagcctgtccgtcacatgcactgtctcaggggtctcattacccgactatggtgtaagctggattcgccagcctccacgaaagggtctggagtggctgggagtaatatggggtagtgaaaccacatactataattcagctctcaaatccagactgaccatcatcaaggacaactccaagagccaagttttcttaaaaatgaacagtctgcaaactgatgacacagccatttactactgtgccaaacattattactacggtggtagctatgctatggactactggggccaaggaacctcagtcaccgtctcctcaaccacgacgccagcgccgcgaccaccaacaccggcgcccaccatcgcgtcgcagcccctgtccctgcgcccagaggcgtgccggccagcggcggggggcgcagtgcacacgagggggctggacttcgcctgtgatatctacatctgggcgcccttggccgggacttgtggggtccttctcctgtcactggttatcaccctttactgcaaacggggcagaaagaaactcctgtatatattcaaacaaccatttatgagaccagtacaaactactcaagaggaagatggctgtagctgccgatttccagaagaagaagaaggaggatgtgaactgagagtgaagttcagcaggagcgcagacgcccccgcgtacaagcagggccagaaccagctctataacgagctcaatctaggacgaagagaggagtacgatgttttggacaagaggcgtggccgggaccctgagatggggggaaagccgagaaggaagaaccctcaggaaggcctgtacaatgaactgcagaaagataagatggcggaggcctacagtgagattgggatgaaaggcgagcgccggaggggcaaggggcacgatggcctttaccagggtctcagtacagccaccaaggacacctacgacgcccttcacatgcaggccctgccccctcgctaa

SEQ ID NO: 205 - protein, 485 aa, Artificial Sequence
  Synthesized
MALPVTALLLPLALLLHAARPDIVMTQSPSSLTVTAGEKVTMICKSSQSLLNSGDQKNYLTWYQQKPGQPPKLLIFWASTRESGVPDRFTGSGSGTDFTLTISSVQAEDLAVYYCQNDYSYPLTFGAGTKLELKGGGGSGGGGSGGGGSQVQLQQSDAELVKPGSSVKISCKASGYTFTDHAIHWVKQKPEQGLEWIGHFSPGNTDIKYNDKFKGKATLTVDRSSSTAYMQLNSLTSEDSAVYFCKTSTFFFDYWGQGTTLTVSSTTTPAPRPPTPAPTIASQPLSLRPEACRPAAGGAVHTRGLDFACDIYIWAPLAGTCGVLLLSLVITKRGRKKLLYIFKQPFMRPVQTTQEEDGCSCRFPEEEEGGCELRVKFSRSADAPAYQQGQNQLYNELNLGRREEYDVLDKRRGRDPEMGGKPRRKNPQEGLYNELQKDKMAEAYSEIGMKGERRRGKGHDGLYQGLSTATKDTYDALHMQALPPR

SEQ ID NO: 206 - DNA, 3524 bp, Artificial Sequence
  Synthesized
atggccttaccagtgaccgccttgctcctgccgctggccttgctgctccacgccgccaggccggatattgtgatgacccagtccccgtcctccctgaccgtgaccgcgggcgaaaaagtgaccatgatttgcaaatcctcccagtccctgctgaattccggcgatcagaaaaattatctgacctggtatcagcagaaaccgggccagccgccgaaactgctgattttttgggcgtccacccgtgaatccggcgtgccggatcgttttaccggctccggctccggcaccgattttaccctgaccatttcctccgtgcaggcggaagatctggcggtgtattattgccagaatgattattcctatccgctgacctttggcgcgggcaccaaactggaactgaaaggcggcggcggctccggcggcggcggctccggcggcggcggctcccaggtgcagctgcagcagtccgatgcggaactggtgaaaccgggctcctccgtgaaaatttcctgcaaagcgtccggctatacctttaccgatcatgcgattcattgggtgaaacagaaaccggaacagggcctggaatggattggccatttttccccgggcaataccgatattaaatataatgataaatttaaaggcaaagcgaccctgaccgtggatcgttcctcctccaccgcgtatatgcagctgaattccctgacctccgaagattccgcggtgtatttttgcaaaacctccacctttttttttgattattggggccagggcaccaccctgaccgtgtcctccaccacgacgccagcgccgcgaccaccaacaccggcgcccaccatcgcgtcgcagcccctgtccctgcgcccagaggcgtgccggccagcggcggggggcgcagtgcacacgagggggctggacttcgcctgtgatatctacatctgggcgcccttggccgggacttgtggggtccttctcctgtcactggttatcaccctttactgcaaacggggcagaaagaaactcctgtatatattcaaacaaccatttatgagaccagtacaaactactcaagaggaagatggctgtagctgccgatttccagaagaagaagaaggaggatgtgaactgagagtgaagttcagcaggagcgcagacgcccccgcgtacaagcagggccagaaccagctctataacgagctcaatctaggacgaagagaggagtacgatgttttggacaagaggcgtggccgggaccctgagatggggggaaagccgagaaggaagaaccctcaggaaggcctgtacaatgaactgcagaaagataagatggcggaggcctacagtgagattgggatgaaaggcgagcgccggaggggcaaggggcacgatggcctttaccagggtctcagtacagccaccaaggacacctacgacgcccttcacatgcaggccctgccccctcgctaatctagaggcgcgcccctctccctcccccccccctaacgttactggccgaagccgcttggaataaggccggtgtgcgtttgtctatatgttattttccaccatattgccgtcttttggcaatgtgagggcccggaaacctggccctgtcttcttgacgagcattcctaggggtctttcccctctcgccaaaggaatgcaaggtctgttgaatgtcgtgaaggaagcagttcctctggaagcttcttgaagacaaacaacgtctgtagcgaccctttgcaggcagcggaaccccccacctggcgacaggtgcctctgcggccaaaagccacgtgtataagatacacctgcaaaggcggcacaaccccagtgccacgttgtgagttggatagttgtggaaagagtcaaatggctctcctcaagcgtattcaacaaggggctgaaggatgcccagaaggtaccccattgtatgggatctgatctggggcctcggtacacatgctttacatgtgtttagtcgaggttaaaaaaacgtctaggccccccgaaccacggggacgtggttttcctttgaaaaacacgatgataatatggccacaacccatatgatggccttaccagtgaccgccttgctcctgccgctggccttgctgctccacgccgccaggccggacatccagatgacacagactacatcctccctgtctgcctctctgggagacagagtcaccatcagttgcagggcaagtcaggacattagtaaatatttaaattggtatcagcagaaaccagatggaactgttaaactcctgatctaccatacatcaagattacactcaggagtcccatcaaggttcagtggcagtgggtctggaacagattattctctcaccattagcaacctggagcaagaagatattgccacttacttttgccaacagggtaatacgcttccgtacacgttcggaggggggaccaagctggagatcacaggtggcggtggctcgggcggtggtgggtcgggtggcggcggatctgaggtgaaactgcaggagtcaggacctggcctggtggcgccctcacagagcctgtccgtcacatgcactgtctcaggggtctcattacccgactatggtgtaagctggattcgccagcctccacgaaagggtctggagtggctgggagtaatatggggtagtgaaaccacatactataattcagctctcaaatccagactgaccatcatcaaggacaactccaagagccaagttttcttaaaaatgaacagtctgcaaactgatgacacagccatttactactgtgccaaacattattactacggtggtagctatgctatggactactggggccaaggaacctcagtcaccgtctcctcaaccacgacgccagcgccgcgaccaccaacaccggcgcccaccatcgcgtcgcagcccctgtccctgcgcccagaggcgtgccggccagcggcggggggcgcagtgcacacgagggggctggacttcgcctgtgatatctacatctgggcgcccttggccgggacttgtggggtccttctcctgtcactggttatcaccaaacggggcagaaagaaactcctgtatatattcaaacaaccatttatgagaccagtacaaactactcaagaggaagatggctgtagctgccgatttccagaagaagaagaaggaggatgtgaactgagagtgaagttcagcaggagcgcagacgcccccgcgtacaagcagggccagaaccagctctataacgagctcaatctaggacgaagagaggagtacgatgttttggacaagaggcgtggccgggaccctgagatggggggaaagccgagaaggaagaaccctcaggaaggcctgtacaatgaactgcagaaagataagatggcggaggcctacagtgagattgggatgaaaggcgagcgccggaggggcaaggggcacgatggcctttaccagggtctcagtacagccaccaaggacacctacgacgcccttcacatgcaggccctgccccctcgctaa

SEQ ID NO: 207 - protein, 483 aa, Artificial Sequence
  Synthesized
MALPVTALLLPLALLLHAARPDIQMTQTTSSLSASLGDRVTISCRASQDISKYLNWYQQKPDGTVKLLIYHTSRLHSGVPSRFSGSGSGTDYSLTISNLEQEDIATYFCQQGNTLPYTFGGGTKLEITGGGGSGGGGSGGGGSEVKLQESGPGLVAPSQSLSVTCTVSGVSLPDYGVSWIRQPPRKGLEWLGVIWGSETTYYNSALKSRLTIIKDNSKSQVFLKMNSLQTDDTAIYYCAKHYYYGGSYAMDYWGQGTSVTVSSTTTPAPRPPTPAPTIASQPLSLRPEACRPAAGGAVHTRGLDFACDIYIWAPLAGTCGVLLLSLVITKRGRKKLLYIFKQPFMRPVQTTQEEDGCSCRFPEEEEGGCELRVKFSRSADAPAYQQGQNQLYNELNLGRREEYDVLDKRRGRDPEMGGKPRRKNPQEGLYNELQKDKMAEAYSEIGMKGERRRGKGHDGLYQGLSTATKDTYDALHMQALPPR

SEQ ID NO: 208 - DNA, 3515 bp, Artificial Sequence
  Synthesized
atggccttaccagtgaccgccttgctcctgccgctggccttgctgctccacgccgccaggccggatattgtgatgacccagtccccgtcctccctgaccgtgaccgcgggcgaaaaagtgaccatgatttgcaaatcctcccagtccctgctgaattccggcgatcagaaaaattatctgacctggtatcagcagaaaccgggccagccgccgaaactgctgattttttgggcgtccacccgtgaatccggcgtgccggatcgttttaccggctccggctccggcaccgattttaccctgaccatttcctccgtgcaggcggaagatctggcggtgtattattgccagaatgattattcctatccgctgacctttggcgcgggcaccaaactggaactgaaaggcggcggcggctccggcggcggcggctccggcggcggcggctcccaggtgcagctgcagcagtccgatgcggaactggtgaaaccgggctcctccgtgaaaatttcctgcaaagcgtccggctatacctttaccgatcatgcgattcattgggtgaaacagaaaccggaacagggcctggaatggattggccatttttccccgggcaataccgatattaaatataatgataaatttaaaggcaaagcgaccctgaccgtggatcgttcctcctccaccgcgtatatgcagctgaattccctgacctccgaagattccgcggtgtatttttgcaaaacctccacctttttttttgattattggggccagggcaccaccctgaccgtgtcctccaccacgacgccagcgccgcgaccaccaacaccggcgcccaccatcgcgtcgcagcccctgtccctgcgcccagaggcgtgccggccagcggcggggggcgcagtgcacacgagggggctggacttcgcctgtgatatctacatctgggcgcccttggccgggacttgtggggtccttctcctgtcactggttatcaccaaacggggcagaaagaaactcctgtatatattcaaacaaccatttatgagaccagtacaaactactcaagaggaagatggctgtagctgccgatttccagaagaagaagaaggaggatgtgaactgagagtgaagttcagcaggagcgcagacgcccccgcgtacaagcagggccagaaccagctctataacgagctcaatctaggacgaagagaggagtacgatgttttggacaagaggcgtggccgggaccctgagatggggggaaagccgagaaggaagaaccctcaggaaggcctgtacaatgaactgcagaaagataagatggcggaggcctacagtgagattgggatgaaaggcgagcgccggaggggcaaggggcacgatggcctttaccagggtctcagtacagccaccaaggacacctacgacgcccttcacatgcaggccctgccccctcgctaatctagaggcgcgcccctctccctcccccccccctaacgttactggccgaagccgcttggaataaggccggtgtgcgtttgtctatatgttattttccaccatattgccgtcttttggcaatgtgagggcccggaaacctggccctgtcttcttgacgagcattcctaggggtctttcccctctcgccaaaggaatgcaaggtctgttgaatgtcgtgaaggaagcagttcctctggaagcttcttgaagacaaacaacgtctgtagcgaccctttgcaggcagcggaaccccccacctggcgacaggtgcctctgcggccaaaagccacgtgtataagatacacctgcaaaggcggcacaaccccagtgccacgttgtgagttggatagttgtggaaagagtcaaatggctctcctcaagcgtattcaacaaggggctgaaggatgcccagaaggtaccccattgtatgggatctgatctggggcctcggtacacatgctttacatgtgtttagtcgaggttaaaaaaacgtctaggccccccgaaccacggggacgtggttttcctttgaaaaacacgatgataatatggccacaacccatatgatggccttaccagtgaccgccttgctcctgccgctggccttgctgctccacgccgccaggccggacatccagatgacacagactacatcctccctgtctgcctctctgggagacagagtcaccatcagttgcagggcaagtcaggacattagtaaatatttaaattggtatcagcagaaaccagatggaactgttaaactcctgatctaccatacatcaagattacactcaggagtcccatcaaggttcagtggcagtgggtctggaacagattattctctcaccattagcaacctggagcaagaagatattgccacttacttttgccaacagggtaatacgcttccgtacacgttcggaggggggaccaagctggagatcacaggtggcggtggctcgggcggtggtgggtcgggtggcggcggatctgaggtgaaactgcaggagtcaggacctggcctggtggcgccctcacagagcctgtccgtcacatgcactgtctcaggggtctcattacccgactatggtgtaagctggattcgccagcctccacgaaagggtctggagtggctgggagtaatatggggtagtgaaaccacatactataattcagctctcaaatccagactgaccatcatcaaggacaactccaagagccaagttttcttaaaaatgaacagtctgcaaactgatgacacagccatttactactgtgccaaacattattactacggtggtagctatgctatggactactggggccaaggaacctcagtcaccgtctcctcaaccacgacgccagcgccgcgaccaccaacaccggcgcccaccatcgcgtcgcagcccctgtccctgcgcccagaggcgtgccggccagcggcggggggcgcagtgcacacgagggggctggacttcgcctgtgatatctacatctgggcgcccttggccgggacttgtggggtccttctcctgtcactggttatcaccaaacggggcagaaagaaactcctgtatatattcaaacaaccatttatgagaccagtacaaactactcaagaggaagatggctgtagctgccgatttccagaagaagaagaaggaggatgtgaactgagagtgaagttcagcaggagcgcagacgcccccgcgtacaagcagggccagaaccagctctataacgagctcaatctaggacgaagagaggagtacgatgttttggacaagaggcgtggccgggaccctgagatggggggaaagccgagaaggaagaaccctcaggaaggcctgtacaatgaactgcagaaagataagatggcggaggcctacagtgagattgggatgaaaggcgagcgccggaggggcaaggggcacgatggcctttaccagggtctcagtacagccaccaaggacacctacgacgcccttcacatgcaggccctgccccctcgctaa

SEQ ID NO: 209 - DNA, 3533 bp, Artificial Sequence
  Synthesized
atggccttaccagtgaccgccttgctcctgccgctggccttgctgctccacgccgccaggccggacatcgtgatgacccagtccccctccagcctgacagtgacagccggcgagaaggtgacaatgatctgtaagtccagccagagcctgctgaacagcggcgaccagaagaactacctgacctggtaccagcagaagcctggccagccccccaagctgctgatcttctgggccagcacaagggagagcggcgtgcccgacagattcacaggcagcggcagcggcaccgacttcacactgaccatttcctccgtgcaggccgaggacctcgccgtgtactactgccagaacgactactcctaccccctgacattcggcgccggcaccaaactggagctgaagggtggcggtggctcgggcggtggtgggtcgggtggcggcggatctcaggtgcagctccagcagtccgatgccgagctggtgaagcccggaagcagcgtcaagatcagctgtaaggcctccggctacaccttcacagaccacgccatccactgggtgaagcagaagcccgagcagggcctggagtggatcggccactttagccccggaaacaccgacatcaagtacaacgacaagttcaagggcaaggccaccctgaccgtggacaggagcagcagcaccgcctacatgcagctgaacagcctgacaagcgaggacagcgccgtgtacttctgcaagacctccaccttcttcttcgactactggggccagggaaccaccctgacagtgtccagcaccacgacgccagcgccgcgaccaccaacaccggcgcccaccatcgcgtcgcagcccctgtccctgcgcccagaggcgtgccggccagcggcggggggcgcagtgcacacgagggggctggacttcgcctgtgatatctacatctgggcgcccttggccgggacttgtggggtccttctcctgtcactggttatcaccctttactgcaaacggggcagaaagaaactcctgtatatattcaaacaaccatttatgagaccagtacaaactactcaagaggaagatggctgtagctgccgatttccagaagaagaagaaggaggatgtgaactgagagtgaagttcagcaggagcgcagacgcccccgcgtacaagcagggccagaaccagctctataacgagctcaatctaggacgaagagaggagtacgatgttttggacaagaggcgtggccgggaccctgagatggggggaaagccgagaaggaagaaccctcaggaaggcctgtacaatgaactgcagaaagataagatggcggaggcctacagtgagattgggatgaaaggcgagcgccggaggggcaaggggcacgatggcctttaccagggtctcagtacagccaccaaggacacctacgacgcccttcacatgcaggccctgccccctcgctaatctagaggcgcgcccctctccctcccccccccctaacgttactggccgaagccgcttggaataaggccggtgtgcgtttgtctatatgttattttccaccatattgccgtcttttggcaatgtgagggcccggaaacctggccctgtcttcttgacgagcattcctaggggtctttcccctctcgccaaaggaatgcaaggtctgttgaatgtcgtgaaggaagcagttcctctggaagcttcttgaagacaaacaacgtctgtagcgaccctttgcaggcagcggaaccccccacctggcgacaggtgcctctgcggccaaaagccacgtgtataagatacacctgcaaaggcggcacaaccccagtgccacgttgtgagttggatagttgtggaaagagtcaaatggctctcctcaagcgtattcaacaaggggctgaaggatgcccagaaggtaccccattgtatgggatctgatctggggcctcggtacacatgctttacatgtgtttagtcgaggttaaaaaaacgtctaggccccccgaaccacggggacgtggttttcctttgaaaaacacgatgataatatggccacaacccatatgatggccttaccagtgaccgccttgctcctgccgctggccttgctgctccacgccgccaggccggacatccagatgacacagactacatcctccctgtctgcctctctgggagacagagtcaccatcagttgcagggcaagtcaggacattagtaaatatttaaattggtatcagcagaaaccagatggaactgttaaactcctgatctaccatacatcaagattacactcaggagtcccatcaaggttcagtggcagtgggtctggaacagattattctctcaccattagcaacctggagcaagaagatattgccacttacttttgccaacagggtaatacgcttccgtacacgttcggaggggggaccaagctggagatcacaggtggcggtggctcgggcggtggtgggtcgggtggcggcggatctgaggtgaaactgcaggagtcaggacctggcctggtggcgccctcacagagcctgtccgtcacatgcactgtctcaggggtctcattacccgactatggtgtaagctggattcgccagcctccacgaaagggtctggagtggctgggagtaatatggggtagtgaaaccacatactataattcagctctcaaatccagactgaccatcatcaaggacaactccaagagccaagttttcttaaaaatgaacagtctgcaaactgatgacacagccatttactactgtgccaaacattattactacggtggtagctatgctatggactactggggccaaggaacctcagtcaccgtctcctcaaccacgacgccagcgccgcgaccaccaacaccggcgcccaccatcgcgtcgcagcccctgtccctgcgcccagaggcgtgccggccagcggcggggggcgcagtgcacacgagggggctggacttcgcctgtgatatctacatctgggcgcccttggccgggacttgtggggtccttctcctgtcactggttatcaccctttactgcaaacggggcagaaagaaactcctgtatatattcaaacaaccatttatgagaccagtacaaactactcaagaggaagatggctgtagctgccgatttccagaagaagaagaaggaggatgtgaactgagagtgaagttcagcaggagcgcagacgcccccgcgtacaagcagggccagaaccagctctataacgagctcaatctaggacgaagagaggagtacgatgttttggacaagaggcgtggccgggaccctgagatggggggaaagccgagaaggaagaaccctcaggaaggcctgtacaatgaactgcagaaagataagatggcggaggcctacagtgagattgggatgaaaggcgagcgccggaggggcaaggggcacgatggcctttaccagggtctcagtacagccaccaaggacacctacgacgcccttcacatgcaggccctgccccctcgctaa

SEQ ID NO: 210 - protein, 490 aa, Artificial Sequence
  Synthesized
MALPVTALLLPLALLLHAARPDIVMTQAAFSNPVTLGTSASISCRSSKSLLHSNGITYFFWYLQKPGLSPQLLIYQMSNLASGVPDRFSSSGSGTDFTLRISRVEAEDVGVYYCAQNLELPPTFGGGTKLEIKRAGGGGSGGGGSGGGGSEVKLVESGGGLVQPGGSMKLSCVASGFTFSNYWMNWVRQSPEKGLEWVAEIRLKSNNYTTHYAESVKGRFTISRDDSKSSVSLQMNNLRVEDTGIYYCTRHYYFDYWGQGTTLTVSSTTTPAPRPPTPAPTIASQPLSLRPEACRPAAGGAVHTRGLDFACDIYIWAPLAGTCGVLLLSLVITLYCKRGRKKLLYIFKQPFMRPVQTTQEEDGCSCRFPEEEEGGCELRVKFSRSADAPAYQQGQNQLYNELNLGRREEYDVLDKRRGRDPEMGGKPRRKNPQEGLYNELQKDKMAEAYSEIGMKGERRRGKGHDGLYQGLSTATKDTYDALHMQALPPR

SEQ ID NO: 211 - DNA, 3524 bp, Artificial Sequence
  Synthesized
atggccttaccagtgaccgccttgctcctgccgctggccttgctgctccacgccgccaggccggacatcgtgatgacccagtccccctccagcctgacagtgacagccggcgagaaggtgacaatgatctgtaagtccagccagagcctgctgaacagcggcgaccagaagaactacctgacctggtaccagcagaagcctggccagccccccaagctgctgatcttctgggccagcacaagggagagcggcgtgcccgacagattcacaggcagcggcagcggcaccgacttcacactgaccatttcctccgtgcaggccgaggacctcgccgtgtactactgccagaacgactactcctaccccctgacattcggcgccggcaccaaactggagctgaagggtggcggtggctcgggcggtggtgggtcgggtggcggcggatctcaggtgcagctccagcagtccgatgccgagctggtgaagcccggaagcagcgtcaagatcagctgtaaggcctccggctacaccttcacagaccacgccatccactgggtgaagcagaagcccgagcagggcctggagtggatcggccactttagccccggaaacaccgacatcaagtacaacgacaagttcaagggcaaggccaccctgaccgtggacaggagcagcagcaccgcctacatgcagctgaacagcctgacaagcgaggacagcgccgtgtacttctgcaagacctccaccttcttcttcgactactggggccagggaaccaccctgacagtgtccagcaccacgacgccagcgccgcgaccaccaacaccggcgcccaccatcgcgtcgcagcccctgtccctgcgcccagaggcgtgccggccagcggcggggggcgcagtgcacacgagggggctggacttcgcctgtgatatctacatctgggcgcccttggccgggacttgtggggtccttctcctgtcactggttatcaccaaacggggcagaaagaaactcctgtatatattcaaacaaccatttatgagaccagtacaaactactcaagaggaagatggctgtagctgccgatttccagaagaagaagaaggaggatgtgaactgagagtgaagttcagcaggagcgcagacgcccccgcgtacaagcagggccagaaccagctctataacgagctcaatctaggacgaagagaggagtacgatgttttggacaagaggcgtggccgggaccctgagatggggggaaagccgagaaggaagaaccctcaggaaggcctgtacaatgaactgcagaaagataagatggcggaggcctacagtgagattgggatgaaaggcgagcgccggaggggcaaggggcacgatggcctttaccagggtctcagtacagccaccaaggacacctacgacgcccttcacatgcaggccctgccccctcgctaatctagaggcgcgcccctctccctcccccccccctaacgttactggccgaagccgcttggaataaggccggtgtgcgtttgtctatatgttattttccaccatattgccgtcttttggcaatgtgagggcccggaaacctggccctgtcttcttgacgagcattcctaggggtctttcccctctcgccaaaggaatgcaaggtctgttgaatgtcgtgaaggaagcagttcctctggaagcttcttgaagacaaacaacgtctgtagcgaccctttgcaggcagcggaaccccccacctggcgacaggtgcctctgcggccaaaagccacgtgtataagatacacctgcaaaggcggcacaaccccagtgccacgttgtgagttggatagttgtggaaagagtcaaatggctctcctcaagcgtattcaacaaggggctgaaggatgcccagaaggtaccccattgtatgggatctgatctggggcctcggtacacatgctttacatgtgtttagtcgaggttaaaaaaacgtctaggccccccgaaccacggggacgtggttttcctttgaaaaacacgatgataatatggccacaacccatatgatggccttaccagtgaccgccttgctcctgccgctggccttgctgctccacgccgccaggccggacatccagatgacacagactacatcctccctgtctgcctctctgggagacagagtcaccatcagttgcagggcaagtcaggacattagtaaatatttaaattggtatcagcagaaaccagatggaactgttaaactcctgatctaccatacatcaagattacactcaggagtcccatcaaggttcagtggcagtgggtctggaacagattattctctcaccattagcaacctggagcaagaagatattgccacttacttttgccaacagggtaatacgcttccgtacacgttcggaggggggaccaagctggagatcacaggtggcggtggctcgggcggtggtgggtcgggtggcggcggatctgaggtgaaactgcaggagtcaggacctggcctggtggcgccctcacagagcctgtccgtcacatgcactgtctcaggggtctcattacccgactatggtgtaagctggattcgccagcctccacgaaagggtctggagtggctgggagtaatatggggtagtgaaaccacatactataattcagctctcaaatccagactgaccatcatcaaggacaactccaagagccaagttttcttaaaaatgaacagtctgcaaactgatgacacagccatttactactgtgccaaacattattactacggtggtagctatgctatggactactggggccaaggaacctcagtcaccgtctcctcaaccacgacgccagcgccgcgaccaccaacaccggcgcccaccatcgcgtcgcagcccctgtccctgcgcccagaggcgtgccggccagcggcggggggcgcagtgcacacgagggggctggacttcgcctgtgatatctacatctgggcgcccttggccgggacttgtggggtccttctcctgtcactggttatcaccctttactgcaaacggggcagaaagaaactcctgtatatattcaaacaaccatttatgagaccagtacaaactactcaagaggaagatggctgtagctgccgatttccagaagaagaagaaggaggatgtgaactgagagtgaagttcagcaggagcgcagacgcccccgcgtacaagcagggccagaaccagctctataacgagctcaatctaggacgaagagaggagtacgatgttttggacaagaggcgtggccgggaccctgagatggggggaaagccgagaaggaagaaccctcaggaaggcctgtacaatgaactgcagaaagataagatggcggaggcctacagtgagattgggatgaaaggcgagcgccggaggggcaaggggcacgatggcctttaccagggtctcagtacagccaccaaggacacctacgacgcccttcacatgcaggccctgccccctcgctaa

SEQ ID NO: 212 - protein, 487 aa, Artificial Sequence
  Synthesized
MALPVTALLLPLALLLHAARPDIVMTQAAFSNPVTLGTSASISCRSSKSLLHSNGITYFFWYLQKPGLSPQLLIYQMSNLASGVPDRFSSSGSGTDFTLRISRVEAEDVGVYYCAQNLELPPTFGGGTKLEIKRAGGGGSGGGGSGGGGSEVKLVESGGGLVQPGGSMKLSCVASGFTFSNYWMNWVRQSPEKGLEWVAEIRLKSNNYTTHYAESVKGRFTISRDDSKSSVSLQMNNLRVEDTGIYYCTRHYYFDYWGQGTTLTVSSTTTPAPRPPTPAPTIASQPLSLRPEACRPAAGGAVHTRGLDFACDIYIWAPLAGTCGVLLLSLVITKRGRKKLLYIFKQPFMRPVQTTQEEDGCSCRFPEEEEGGCELRVKFSRSADAPAYQQGQNQLYNELNLGRREEYDVLDKRRGRDPEMGGKPRRKNPQEGLYNELQKDKMAEAYSEIGMKGERRRGKGHDGLYQGLSTATKDTYDALHMQALPPR

SEQ ID NO: 213 - DNA, 3524 bp, Artificial Sequence
  Synthesized
atggccttaccagtgaccgccttgctcctgccgctggccttgctgctccacgccgccaggccggacatcgtgatgacccagtccccctccagcctgacagtgacagccggcgagaaggtgacaatgatctgtaagtccagccagagcctgctgaacagcggcgaccagaagaactacctgacctggtaccagcagaagcctggccagccccccaagctgctgatcttctgggccagcacaagggagagcggcgtgcccgacagattcacaggcagcggcagcggcaccgacttcacactgaccatttcctccgtgcaggccgaggacctcgccgtgtactactgccagaacgactactcctaccccctgacattcggcgccggcaccaaactggagctgaagggtggcggtggctcgggcggtggtgggtcgggtggcggcggatctcaggtgcagctccagcagtccgatgccgagctggtgaagcccggaagcagcgtcaagatcagctgtaaggcctccggctacaccttcacagaccacgccatccactgggtgaagcagaagcccgagcagggcctggagtggatcggccactttagccccggaaacaccgacatcaagtacaacgacaagttcaagggcaaggccaccctgaccgtggacaggagcagcagcaccgcctacatgcagctgaacagcctgacaagcgaggacagcgccgtgtacttctgcaagacctccaccttcttcttcgactactggggccagggaaccaccctgacagtgtccagcaccacgacgccagcgccgcgaccaccaacaccggcgcccaccatcgcgtcgcagcccctgtccctgcgcccagaggcgtgccggccagcggcggggggcgcagtgcacacgagggggctggacttcgcctgtgatatctacatctgggcgcccttggccgggacttgtggggtccttctcctgtcactggttatcaccctttactgcaaacggggcagaaagaaactcctgtatatattcaaacaaccatttatgagaccagtacaaactactcaagaggaagatggctgtagctgccgatttccagaagaagaagaaggaggatgtgaactgagagtgaagttcagcaggagcgcagacgcccccgcgtacaagcagggccagaaccagctctataacgagctcaatctaggacgaagagaggagtacgatgttttggacaagaggcgtggccgggaccctgagatggggggaaagccgagaaggaagaaccctcaggaaggcctgtacaatgaactgcagaaagataagatggcggaggcctacagtgagattgggatgaaaggcgagcgccggaggggcaaggggcacgatggcctttaccagggtctcagtacagccaccaaggacacctacgacgcccttcacatgcaggccctgccccctcgctaatctagaggcgcgcccctctccctcccccccccctaacgttactggccgaagccgcttggaataaggccggtgtgcgtttgtctatatgttattttccaccatattgccgtcttttggcaatgtgagggcccggaaacctggccctgtcttcttgacgagcattcctaggggtctttcccctctcgccaaaggaatgcaaggtctgttgaatgtcgtgaaggaagcagttcctctggaagcttcttgaagacaaacaacgtctgtagcgaccctttgcaggcagcggaaccccccacctggcgacaggtgcctctgcggccaaaagccacgtgtataagatacacctgcaaaggcggcacaaccccagtgccacgttgtgagttggatagttgtggaaagagtcaaatggctctcctcaagcgtattcaacaaggggctgaaggatgcccagaaggtaccccattgtatgggatctgatctggggcctcggtacacatgctttacatgtgtttagtcgaggttaaaaaaacgtctaggccccccgaaccacggggacgtggttttcctttgaaaaacacgatgataatatggccacaacccatatgatggccttaccagtgaccgccttgctcctgccgctggccttgctgctccacgccgccaggccggacatccagatgacacagactacatcctccctgtctgcctctctgggagacagagtcaccatcagttgcagggcaagtcaggacattagtaaatatttaaattggtatcagcagaaaccagatggaactgttaaactcctgatctaccatacatcaagattacactcaggagtcccatcaaggttcagtggcagtgggtctggaacagattattctctcaccattagcaacctggagcaagaagatattgccacttacttttgccaacagggtaatacgcttccgtacacgttcggaggggggaccaagctggagatcacaggtggcggtggctcgggcggtggtgggtcgggtggcggcggatctgaggtgaaactgcaggagtcaggacctggcctggtggcgccctcacagagcctgtccgtcacatgcactgtctcaggggtctcattacccgactatggtgtaagctggattcgccagcctccacgaaagggtctggagtggctgggagtaatatggggtagtgaaaccacatactataattcagctctcaaatccagactgaccatcatcaaggacaactccaagagccaagttttcttaaaaatgaacagtctgcaaactgatgacacagccatttactactgtgccaaacattattactacggtggtagctatgctatggactactggggccaaggaacctcagtcaccgtctcctcaaccacgacgccagcgccgcgaccaccaacaccggcgcccaccatcgcgtcgcagcccctgtccctgcgcccagaggcgtgccggccagcggcggggggcgcagtgcacacgagggggctggacttcgcctgtgatatctacatctgggcgcccttggccgggacttgtggggtccttctcctgtcactggttatcaccaaacggggcagaaagaaactcctgtatatattcaaacaaccatttatgagaccagtacaaactactcaagaggaagatggctgtagctgccgatttccagaagaagaagaaggaggatgtgaactgagagtgaagttcagcaggagcgcagacgcccccgcgtacaagcagggccagaaccagctctataacgagctcaatctaggacgaagagaggagtacgatgttttggacaagaggcgtggccgggaccctgagatggggggaaagccgagaaggaagaaccctcaggaaggcctgtacaatgaactgcagaaagataagatggcggaggcctacagtgagattgggatgaaaggcgagcgccggaggggcaaggggcacgatggcctttaccagggtctcagtacagccaccaaggacacctacgacgcccttcacatgcaggccctgccccctcgctaa

SEQ ID NO: 214 - DNA, 3515 bp, Artificial Sequence
  Synthesized
atggccttaccagtgaccgccttgctcctgccgctggccttgctgctccacgccgccaggccggacatcgtgatgacccagtccccctccagcctgacagtgacagccggcgagaaggtgacaatgatctgtaagtccagccagagcctgctgaacagcggcgaccagaagaactacctgacctggtaccagcagaagcctggccagccccccaagctgctgatcttctgggccagcacaagggagagcggcgtgcccgacagattcacaggcagcggcagcggcaccgacttcacactgaccatttcctccgtgcaggccgaggacctcgccgtgtactactgccagaacgactactcctaccccctgacattcggcgccggcaccaaactggagctgaagggtggcggtggctcgggcggtggtgggtcgggtggcggcggatctcaggtgcagctccagcagtccgatgccgagctggtgaagcccggaagcagcgtcaagatcagctgtaaggcctccggctacaccttcacagaccacgccatccactgggtgaagcagaagcccgagcagggcctggagtggatcggccactttagccccggaaacaccgacatcaagtacaacgacaagttcaagggcaaggccaccctgaccgtggacaggagcagcagcaccgcctacatgcagctgaacagcctgacaagcgaggacagcgccgtgtacttctgcaagacctccaccttcttcttcgactactggggccagggaaccaccctgacagtgtccagcaccacgacgccagcgccgcgaccaccaacaccggcgcccaccatcgcgtcgcagcccctgtccctgcgcccagaggcgtgccggccagcggcggggggcgcagtgcacacgagggggctggacttcgcctgtgatatctacatctgggcgcccttggccgggacttgtggggtccttctcctgtcactggttatcaccaaacggggcagaaagaaactcctgtatatattcaaacaaccatttatgagaccagtacaaactactcaagaggaagatggctgtagctgccgatttccagaagaagaagaaggaggatgtgaactgagagtgaagttcagcaggagcgcagacgcccccgcgtacaagcagggccagaaccagctctataacgagctcaatctaggacgaagagaggagtacgatgttttggacaagaggcgtggccgggaccctgagatggggggaaagccgagaaggaagaaccctcaggaaggcctgtacaatgaactgcagaaagataagatggcggaggcctacagtgagattgggatgaaaggcgagcgccggaggggcaaggggcacgatggcctttaccagggtctcagtacagccaccaaggacacctacgacgcccttcacatgcaggccctgccccctcgctaatctagaggcgcgcccctctccctcccccccccctaacgttactggccgaagccgcttggaataaggccggtgtgcgtttgtctatatgttattttccaccatattgccgtcttttggcaatgtgagggcccggaaacctggccctgtcttcttgacgagcattcctaggggtctttcccctctcgccaaaggaatgcaaggtctgttgaatgtcgtgaaggaagcagttcctctggaagcttcttgaagacaaacaacgtctgtagcgaccctttgcaggcagcggaaccccccacctggcgacaggtgcctctgcggccaaaagccacgtgtataagatacacctgcaaaggcggcacaaccccagtgccacgttgtgagttggatagttgtggaaagagtcaaatggctctcctcaagcgtattcaacaaggggctgaaggatgcccagaaggtaccccattgtatgggatctgatctggggcctcggtacacatgctttacatgtgtttagtcgaggttaaaaaaacgtctaggccccccgaaccacggggacgtggttttcctttgaaaaacacgatgataatatggccacaacccatatgatggccttaccagtgaccgccttgctcctgccgctggccttgctgctccacgccgccaggccggacatccagatgacacagactacatcctccctgtctgcctctctgggagacagagtcaccatcagttgcagggcaagtcaggacattagtaaatatttaaattggtatcagcagaaaccagatggaactgttaaactcctgatctaccatacatcaagattacactcaggagtcccatcaaggttcagtggcagtgggtctggaacagattattctctcaccattagcaacctggagcaagaagatattgccacttacttttgccaacagggtaatacgcttccgtacacgttcggaggggggaccaagctggagatcacaggtggcggtggctcgggcggtggtgggtcgggtggcggcggatctgaggtgaaactgcaggagtcaggacctggcctggtggcgccctcacagagcctgtccgtcacatgcactgtctcaggggtctcattacccgactatggtgtaagctggattcgccagcctccacgaaagggtctggagtggctgggagtaatatggggtagtgaaaccacatactataattcagctctcaaatccagactgaccatcatcaaggacaactccaagagccaagttttcttaaaaatgaacagtctgcaaactgatgacacagccatttactactgtgccaaacattattactacggtggtagctatgctatggactactggggccaaggaacctcagtcaccgtctcctcaaccacgacgccagcgccgcgaccaccaacaccggcgcccaccatcgcgtcgcagcccctgtccctgcgcccagaggcgtgccggccagcggcggggggcgcagtgcacacgagggggctggacttcgcctgtgatatctacatctgggcgcccttggccgggacttgtggggtccttctcctgtcactggttatcaccaaacggggcagaaagaaactcctgtatatattcaaacaaccatttatgagaccagtacaaactactcaagaggaagatggctgtagctgccgatttccagaagaagaagaaggaggatgtgaactgagagtgaagttcagcaggagcgcagacgcccccgcgtacaagcagggccagaaccagctctataacgagctcaatctaggacgaagagaggagtacgatgttttggacaagaggcgtggccgggaccctgagatggggggaaagccgagaaggaagaaccctcaggaaggcctgtacaatgaactgcagaaagataagatggcggaggcctacagtgagattgggatgaaaggcgagcgccggaggggcaaggggcacgatggcctttaccagggtctcagtacagccaccaaggacacctacgacgcccttcacatgcaggccctgccccctcgctaa

SEQ ID NO: 215 - DNA, 3533 bp, Artificial Sequence
  Synthesized
atggccttaccagtgaccgccttgctcctgccgctggccttgctgctccacgccgccaggccggatattgtgatgacccagtccccgtcctccctgaccgtgaccgcgggcgaaaaagtgaccatgatttgcaaatcctcccagtccctgctgaattccggcgatcagaaaaattatctgacctggtatcagcagaaaccgggccagccgccgaaactgctgattttttgggcgtccacccgtgaatccggcgtgccggatcgttttaccggctccggctccggcaccgattttaccctgaccatttcctccgtgcaggcggaagatctggcggtgtattattgccagaatgattattcctatccgctgacctttggcgcgggcaccaaactggaactgaaaggcggcggcggctccggcggcggcggctccggcggcggcggctcccaggtgcagctgcagcagtccgatgcggaactggtgaaaccgggctcctccgtgaaaatttcctgcaaagcgtccggctatacctttaccgatcatgcgattcattgggtgaaacagaaaccggaacagggcctggaatggattggccatttttccccgggcaataccgatattaaatataatgataaatttaaaggcaaagcgaccctgaccgtggatcgttcctcctccaccgcgtatatgcagctgaattccctgacctccgaagattccgcggtgtatttttgcaaaacctccacctttttttttgattattggggccagggcaccaccctgaccgtgtcctccaccacgacgccagcgccgcgaccaccaacaccggcgcccaccatcgcgtcgcagcccctgtccctgcgcccagaggcgtgccggccagcggcggggggcgcagtgcacacgagggggctggacttcgcctgtgatatctacatctgggcgcccttggccgggacttgtggggtccttctcctgtcactggttatcaccctttactgcaaacggggcagaaagaaactcctgtatatattcaaacaaccatttatgagaccagtacaaactactcaagaggaagatggctgtagctgccgatttccagaagaagaagaaggaggatgtgaactgagagtgaagttcagcaggagcgcagacgcccccgcgtacaagcagggccagaaccagctctataacgagctcaatctaggacgaagagaggagtacgatgttttggacaagaggcgtggccgggaccctgagatggggggaaagccgagaaggaagaaccctcaggaaggcctgtacaatgaactgcagaaagataagatggcggaggcctacagtgagattgggatgaaaggcgagcgccggaggggcaaggggcacgatggcctttaccagggtctcagtacagccaccaaggacacctacgacgcccttcacatgcaggccctgccccctcgctaatctagaggcgcgcccctctccctcccccccccctaacgttactggccgaagccgcttggaataaggccggtgtgcgtttgtctatatgttattttccaccatattgccgtcttttggcaatgtgagggcccggaaacctggccctgtcttcttgacgagcattcctaggggtctttcccctctcgccaaaggaatgcaaggtctgttgaatgtcgtgaaggaagcagttcctctggaagcttcttgaagacaaacaacgtctgtagcgaccctttgcaggcagcggaaccccccacctggcgacaggtgcctctgcggccaaaagccacgtgtataagatacacctgcaaaggcggcacaaccccagtgccacgttgtgagttggatagttgtggaaagagtcaaatggctctcctcaagcgtattcaacaaggggctgaaggatgcccagaaggtaccccattgtatgggatctgatctggggcctcggtacacatgctttacatgtgtttagtcgaggttaaaaaaacgtctaggccccccgaaccacggggacgtggttttcctttgaaaaacacgatgataatatggccacaacccatatgatggccttaccagtgaccgccttgctcctgccgctggccttgctgctccacgccgccaggccggatatccagatgacccagagcccgagcagcctgagcgcgagcgtgggtgatcgcgtgaccattacctgcagggcaagtcaggacattagtaaatatttaaattggtatcagcagaaaccgggtaaagcgccgaaactgttaatttatcatacatcaagattacactcaggcgtgccgtcgcgttttagcggctcgggttcgggcaccgattttaccctgaccatctcgagcttgcagccggaggacttcgccacctactattgccaacagggtaatacgcttccgtacacgttcggtcagggcaccaaagtggagatcaaaggtggcggtggctcgggcggtggtgggtcgggtggcggcggatctgaggtgcagctggtggagtctgggggaggcttggtacagcctggggggtccctgagactctcctgtgcagcctctggagtgtccctgcctgattatggcgtgtcctgggtccgccaggctccagggaaggggctggagtgggtttcagtgatctggggcagcgagacaacctactacaacagcgccctgaagtcccgattcaccatctccagagacaatgccaagaactcactgtatctgcaaatgaacagcctgagagccgaggacacggctgtgtattactgtgcgaagcactactactacggcggcagctacgctatggactactggggccaaggaaccctggtcaccgtgtcctcaaccacgacgccagcgccgcgaccaccaacaccggcgcccaccatcgcgtcgcagcccctgtccctgcgcccagaggcgtgccggccagcggcggggggcgcagtgcacacgagggggctggacttcgcctgtgatatctacatctgggcgcccttggccgggacttgtggggtccttctcctgtcactggttatcaccctttactgcaaacggggcagaaagaaactcctgtatatattcaaacaaccatttatgagaccagtacaaactactcaagaggaagatggctgtagctgccgatttccagaagaagaagaaggaggatgtgaactgagagtgaagttcagcaggagcgcagacgcccccgcgtacaagcagggccagaaccagctctataacgagctcaatctaggacgaagagaggagtacgatgttttggacaagaggcgtggccgggaccctgagatggggggaaagccgagaaggaagaaccctcaggaaggcctgtacaatgaactgcagaaagataagatggcggaggcctacagtgagattgggatgaaaggcgagcgccggaggggcaaggggcacgatggcctttaccagggtctcagtacagccaccaaggacacctacgacgcccttcacatgcaggccctgccccctcgctaa

SEQ ID NO: 216 - protein, 486 aa, Artificial Sequence
  Synthesized
MALPVTALLLPLALLLHAARPDIQMTQSPSSLSASVGDRVTITCRASQDISKYLNWYQQKPGKAPKLLIYHTSRLHSGVPSRFSGSGSGTDFTLTISSLQPEDFATYYCQQGNTLPYTFGQGTKVEIKGGGGSGGGGSGGGGSEVQLVESGGGLVQPGGSLRLSCAASGVSLPDYGVSWVRQAPGKGLEWVSVIWGSETTYYNSALKSRFTISRDNAKNSLYLQMNSLRAEDTAVYYCAKHYYYGGSYAMDYWGQGTLVTVSSTTTPAPRPPTPAPTIASQPLSLRPEACRPAAGGAVHTRGLDFACDIYIWAPLAGTCGVLLLSLVITLYCKRGRKKLLYIFKQPFMRPVQTTQEEDGCSCRFPEEEEGGCELRVKFSRSADAPAYQQGQNQLYNELNLGRREEYDVLDKRRGRDPEMGGKPRRKNPQEGLYNELQKDKMAEAYSEIGMKGERRRGKGHDGLYQGLSTATKDTYDALHMQALPPR

SEQ ID NO: 217 - DNA, 3524 bp, Artificial Sequence
  Synthesized
atggccttaccagtgaccgccttgctcctgccgctggccttgctgctccacgccgccaggccggatattgtgatgacccagtccccgtcctccctgaccgtgaccgcgggcgaaaaagtgaccatgatttgcaaatcctcccagtccctgctgaattccggcgatcagaaaaattatctgacctggtatcagcagaaaccgggccagccgccgaaactgctgattttttgggcgtccacccgtgaatccggcgtgccggatcgttttaccggctccggctccggcaccgattttaccctgaccatttcctccgtgcaggcggaagatctggcggtgtattattgccagaatgattattcctatccgctgacctttggcgcgggcaccaaactggaactgaaaggcggcggcggctccggcggcggcggctccggcggcggcggctcccaggtgcagctgcagcagtccgatgcggaactggtgaaaccgggctcctccgtgaaaatttcctgcaaagcgtccggctatacctttaccgatcatgcgattcattgggtgaaacagaaaccggaacagggcctggaatggattggccatttttccccgggcaataccgatattaaatataatgataaatttaaaggcaaagcgaccctgaccgtggatcgttcctcctccaccgcgtatatgcagctgaattccctgacctccgaagattccgcggtgtatttttgcaaaacctccacctttttttttgattattggggccagggcaccaccctgaccgtgtcctccaccacgacgccagcgccgcgaccaccaacaccggcgcccaccatcgcgtcgcagcccctgtccctgcgcccagaggcgtgccggccagcggcggggggcgcagtgcacacgagggggctggacttcgcctgtgatatctacatctgggcgcccttggccgggacttgtggggtccttctcctgtcactggttatcaccaaacggggcagaaagaaactcctgtatatattcaaacaaccatttatgagaccagtacaaactactcaagaggaagatggctgtagctgccgatttccagaagaagaagaaggaggatgtgaactgagagtgaagttcagcaggagcgcagacgcccccgcgtacaagcagggccagaaccagctctataacgagctcaatctaggacgaagagaggagtacgatgttttggacaagaggcgtggccgggaccctgagatggggggaaagccgagaaggaagaaccctcaggaaggcctgtacaatgaactgcagaaagataagatggcggaggcctacagtgagattgggatgaaaggcgagcgccggaggggcaaggggcacgatggcctttaccagggtctcagtacagccaccaaggacacctacgacgcccttcacatgcaggccctgccccctcgctaatctagaggcgcgcccctctccctcccccccccctaacgttactggccgaagccgcttggaataaggccggtgtgcgtttgtctatatgttattttccaccatattgccgtcttttggcaatgtgagggcccggaaacctggccctgtcttcttgacgagcattcctaggggtctttcccctctcgccaaaggaatgcaaggtctgttgaatgtcgtgaaggaagcagttcctctggaagcttcttgaagacaaacaacgtctgtagcgaccctttgcaggcagcggaaccccccacctggcgacaggtgcctctgcggccaaaagccacgtgtataagatacacctgcaaaggcggcacaaccccagtgccacgttgtgagttggatagttgtggaaagagtcaaatggctctcctcaagcgtattcaacaaggggctgaaggatgcccagaaggtaccccattgtatgggatctgatctggggcctcggtacacatgctttacatgtgtttagtcgaggttaaaaaaacgtctaggccccccgaaccacggggacgtggttttcctttgaaaaacacgatgataatatggccacaacccatatgatggccttaccagtgaccgccttgctcctgccgctggccttgctgctccacgccgccaggccggatatccagatgacccagagcccgagcagcctgagcgcgagcgtgggtgatcgcgtgaccattacctgcagggcaagtcaggacattagtaaatatttaaattggtatcagcagaaaccgggtaaagcgccgaaactgttaatttatcatacatcaagattacactcaggcgtgccgtcgcgttttagcggctcgggttcgggcaccgattttaccctgaccatctcgagcttgcagccggaggacttcgccacctactattgccaacagggtaatacgcttccgtacacgttcggtcagggcaccaaagtggagatcaaaggtggcggtggctcgggcggtggtgggtcgggtggcggcggatctgaggtgcagctggtggagtctgggggaggcttggtacagcctggggggtccctgagactctcctgtgcagcctctggagtgtccctgcctgattatggcgtgtcctgggtccgccaggctccagggaaggggctggagtgggtttcagtgatctggggcagcgagacaacctactacaacagcgccctgaagtcccgattcaccatctccagagacaatgccaagaactcactgtatctgcaaatgaacagcctgagagccgaggacacggctgtgtattactgtgcgaagcactactactacggcggcagctacgctatggactactggggccaaggaaccctggtcaccgtgtcctcaaccacgacgccagcgccgcgaccaccaacaccggcgcccaccatcgcgtcgcagcccctgtccctgcgcccagaggcgtgccggccagcggcggggggcgcagtgcacacgagggggctggacttcgcctgtgatatctacatctgggcgcccttggccgggacttgtggggtccttctcctgtcactggttatcaccctttactgcaaacggggcagaaagaaactcctgtatatattcaaacaaccatttatgagaccagtacaaactactcaagaggaagatggctgtagctgccgatttccagaagaagaagaaggaggatgtgaactgagagtgaagttcagcaggagcgcagacgcccccgcgtacaagcagggccagaaccagctctataacgagctcaatctaggacgaagagaggagtacgatgttttggacaagaggcgtggccgggaccctgagatggggggaaagccgagaaggaagaaccctcaggaaggcctgtacaatgaactgcagaaagataagatggcggaggcctacagtgagattgggatgaaaggcgagcgccggaggggcaaggggcacgatggcctttaccagggtctcagtacagccaccaaggacacctacgacgcccttcacatgcaggccctgccccctcgctaa

SEQ ID NO: 218 - DNA, 3524 bp, Artificial Sequence
  Synthesized
atggccttaccagtgaccgccttgctcctgccgctggccttgctgctccacgccgccaggccggatattgtgatgacccagtccccgtcctccctgaccgtgaccgcgggcgaaaaagtgaccatgatttgcaaatcctcccagtccctgctgaattccggcgatcagaaaaattatctgacctggtatcagcagaaaccgggccagccgccgaaactgctgattttttgggcgtccacccgtgaatccggcgtgccggatcgttttaccggctccggctccggcaccgattttaccctgaccatttcctccgtgcaggcggaagatctggcggtgtattattgccagaatgattattcctatccgctgacctttggcgcgggcaccaaactggaactgaaaggcggcggcggctccggcggcggcggctccggcggcggcggctcccaggtgcagctgcagcagtccgatgcggaactggtgaaaccgggctcctccgtgaaaatttcctgcaaagcgtccggctatacctttaccgatcatgcgattcattgggtgaaacagaaaccggaacagggcctggaatggattggccatttttccccgggcaataccgatattaaatataatgataaatttaaaggcaaagcgaccctgaccgtggatcgttcctcctccaccgcgtatatgcagctgaattccctgacctccgaagattccgcggtgtatttttgcaaaacctccacctttttttttgattattggggccagggcaccaccctgaccgtgtcctccaccacgacgccagcgccgcgaccaccaacaccggcgcccaccatcgcgtcgcagcccctgtccctgcgcccagaggcgtgccggccagcggcggggggcgcagtgcacacgagggggctggacttcgcctgtgatatctacatctgggcgcccttggccgggacttgtggggtccttctcctgtcactggttatcaccctttactgcaaacggggcagaaagaaactcctgtatatattcaaacaaccatttatgagaccagtacaaactactcaagaggaagatggctgtagctgccgatttccagaagaagaagaaggaggatgtgaactgagagtgaagttcagcaggagcgcagacgcccccgcgtacaagcagggccagaaccagctctataacgagctcaatctaggacgaagagaggagtacgatgttttggacaagaggcgtggccgggaccctgagatggggggaaagccgagaaggaagaaccctcaggaaggcctgtacaatgaactgcagaaagataagatggcggaggcctacagtgagattgggatgaaaggcgagcgccggaggggcaaggggcacgatggcctttaccagggtctcagtacagccaccaaggacacctacgacgcccttcacatgcaggccctgccccctcgctaatctagaggcgcgcccctctccctcccccccccctaacgttactggccgaagccgcttggaataaggccggtgtgcgtttgtctatatgttattttccaccatattgccgtcttttggcaatgtgagggcccggaaacctggccctgtcttcttgacgagcattcctaggggtctttcccctctcgccaaaggaatgcaaggtctgttgaatgtcgtgaaggaagcagttcctctggaagcttcttgaagacaaacaacgtctgtagcgaccctttgcaggcagcggaaccccccacctggcgacaggtgcctctgcggccaaaagccacgtgtataagatacacctgcaaaggcggcacaaccccagtgccacgttgtgagttggatagttgtggaaagagtcaaatggctctcctcaagcgtattcaacaaggggctgaaggatgcccagaaggtaccccattgtatgggatctgatctggggcctcggtacacatgctttacatgtgtttagtcgaggttaaaaaaacgtctaggccccccgaaccacggggacgtggttttcctttgaaaaacacgatgataatatggccacaacccatatgatggccttaccagtgaccgccttgctcctgccgctggccttgctgctccacgccgccaggccggatatccagatgacccagagcccgagcagcctgagcgcgagcgtgggtgatcgcgtgaccattacctgcagggcaagtcaggacattagtaaatatttaaattggtatcagcagaaaccgggtaaagcgccgaaactgttaatttatcatacatcaagattacactcaggcgtgccgtcgcgttttagcggctcgggttcgggcaccgattttaccctgaccatctcgagcttgcagccggaggacttcgccacctactattgccaacagggtaatacgcttccgtacacgttcggtcagggcaccaaagtggagatcaaaggtggcggtggctcgggcggtggtgggtcgggtggcggcggatctgaggtgcagctggtggagtctgggggaggcttggtacagcctggggggtccctgagactctcctgtgcagcctctggagtgtccctgcctgattatggcgtgtcctgggtccgccaggctccagggaaggggctggagtgggtttcagtgatctggggcagcgagacaacctactacaacagcgccctgaagtcccgattcaccatctccagagacaatgccaagaactcactgtatctgcaaatgaacagcctgagagccgaggacacggctgtgtattactgtgcgaagcactactactacggcggcagctacgctatggactactggggccaaggaaccctggtcaccgtgtcctcaaccacgacgccagcgccgcgaccaccaacaccggcgcccaccatcgcgtcgcagcccctgtccctgcgcccagaggcgtgccggccagcggcggggggcgcagtgcacacgagggggctggacttcgcctgtgatatctacatctgggcgcccttggccgggacttgtggggtccttctcctgtcactggttatcaccaaacggggcagaaagaaactcctgtatatattcaaacaaccatttatgagaccagtacaaactactcaagaggaagatggctgtagctgccgatttccagaagaagaagaaggaggatgtgaactgagagtgaagttcagcaggagcgcagacgcccccgcgtacaagcagggccagaaccagctctataacgagctcaatctaggacgaagagaggagtacgatgttttggacaagaggcgtggccgggaccctgagatggggggaaagccgagaaggaagaaccctcaggaaggcctgtacaatgaactgcagaaagataagatggcggaggcctacagtgagattgggatgaaaggcgagcgccggaggggcaaggggcacgatggcctttaccagggtctcagtacagccaccaaggacacctacgacgcccttcacatgcaggccctgccccctcgctaa

SEQ ID NO: 219 - protein, 483 aa, Artificial Sequence
  Synthesized
MALPVTALLLPLALLLHAARPDIQMTQSPSSLSASVGDRVTITCRASQDISKYLNWYQQKPGKAPKLLIYHTSRLHSGVPSRFSGSGSGTDFTLTISSLQPEDFATYYCQQGNTLPYTFGQGTKVEIKGGGGSGGGGSGGGGSEVQLVESGGGLVQPGGSLRLSCAASGVSLPDYGVSWVRQAPGKGLEWVSVIWGSETTYYNSALKSRFTISRDNAKNSLYLQMNSLRAEDTAVYYCAKHYYYGGSYAMDYWGQGTLVTVSSTTTPAPRPPTPAPTIASQPLSLRPEACRPAAGGAVHTRGLDFACDIYIWAPLAGTCGVLLLSLVITKRGRKKLLYIFKQPFMRPVQTTQEEDGCSCRFPEEEEGGCELRVKFSRSADAPAYQQGQNQLYNELNLGRREEYDVLDKRRGRDPEMGGKPRRKNPQEGLYNELQKDKMAEAYSEIGMKGERRRGKGHDGLYQGLSTATKDTYDALHMQALPPR

SEQ ID NO: 220 - DNA, 3515 bp, Artificial Sequence
  Synthesized
atggccttaccagtgaccgccttgctcctgccgctggccttgctgctccacgccgccaggccggatattgtgatgacccagtccccgtcctccctgaccgtgaccgcgggcgaaaaagtgaccatgatttgcaaatcctcccagtccctgctgaattccggcgatcagaaaaattatctgacctggtatcagcagaaaccgggccagccgccgaaactgctgattttttgggcgtccacccgtgaatccggcgtgccggatcgttttaccggctccggctccggcaccgattttaccctgaccatttcctccgtgcaggcggaagatctggcggtgtattattgccagaatgattattcctatccgctgacctttggcgcgggcaccaaactggaactgaaaggcggcggcggctccggcggcggcggctccggcggcggcggctcccaggtgcagctgcagcagtccgatgcggaactggtgaaaccgggctcctccgtgaaaatttcctgcaaagcgtccggctatacctttaccgatcatgcgattcattgggtgaaacagaaaccggaacagggcctggaatggattggccatttttccccgggcaataccgatattaaatataatgataaatttaaaggcaaagcgaccctgaccgtggatcgttcctcctccaccgcgtatatgcagctgaattccctgacctccgaagattccgcggtgtatttttgcaaaacctccacctttttttttgattattggggccagggcaccaccctgaccgtgtcctccaccacgacgccagcgccgcgaccaccaacaccggcgcccaccatcgcgtcgcagcccctgtccctgcgcccagaggcgtgccggccagcggcggggggcgcagtgcacacgagggggctggacttcgcctgtgatatctacatctgggcgcccttggccgggacttgtggggtccttctcctgtcactggttatcaccaaacggggcagaaagaaactcctgtatatattcaaacaaccatttatgagaccagtacaaactactcaagaggaagatggctgtagctgccgatttccagaagaagaagaaggaggatgtgaactgagagtgaagttcagcaggagcgcagacgcccccgcgtacaagcagggccagaaccagctctataacgagctcaatctaggacgaagagaggagtacgatgttttggacaagaggcgtggccgggaccctgagatggggggaaagccgagaaggaagaaccctcaggaaggcctgtacaatgaactgcagaaagataagatggcggaggcctacagtgagattgggatgaaaggcgagcgccggaggggcaaggggcacgatggcctttaccagggtctcagtacagccaccaaggacacctacgacgcccttcacatgcaggccctgccccctcgctaatctagaggcgcgcccctctccctcccccccccctaacgttactggccgaagccgcttggaataaggccggtgtgcgtttgtctatatgttattttccaccatattgccgtcttttggcaatgtgagggcccggaaacctggccctgtcttcttgacgagcattcctaggggtctttcccctctcgccaaaggaatgcaaggtctgttgaatgtcgtgaaggaagcagttcctctggaagcttcttgaagacaaacaacgtctgtagcgaccctttgcaggcagcggaaccccccacctggcgacaggtgcctctgcggccaaaagccacgtgtataagatacacctgcaaaggcggcacaaccccagtgccacgttgtgagttggatagttgtggaaagagtcaaatggctctcctcaagcgtattcaacaaggggctgaaggatgcccagaaggtaccccattgtatgggatctgatctggggcctcggtacacatgctttacatgtgtttagtcgaggttaaaaaaacgtctaggccccccgaaccacggggacgtggttttcctttgaaaaacacgatgataatatggccacaacccatatgatggccttaccagtgaccgccttgctcctgccgctggccttgctgctccacgccgccaggccggatatccagatgacccagagcccgagcagcctgagcgcgagcgtgggtgatcgcgtgaccattacctgcagggcaagtcaggacattagtaaatatttaaattggtatcagcagaaaccgggtaaagcgccgaaactgttaatttatcatacatcaagattacactcaggcgtgccgtcgcgttttagcggctcgggttcgggcaccgattttaccctgaccatctcgagcttgcagccggaggacttcgccacctactattgccaacagggtaatacgcttccgtacacgttcggtcagggcaccaaagtggagatcaaaggtggcggtggctcgggcggtggtgggtcgggtggcggcggatctgaggtgcagctggtggagtctgggggaggcttggtacagcctggggggtccctgagactctcctgtgcagcctctggagtgtccctgcctgattatggcgtgtcctgggtccgccaggctccagggaaggggctggagtgggtttcagtgatctggggcagcgagacaacctactacaacagcgccctgaagtcccgattcaccatctccagagacaatgccaagaactcactgtatctgcaaatgaacagcctgagagccgaggacacggctgtgtattactgtgcgaagcactactactacggcggcagctacgctatggactactggggccaaggaaccctggtcaccgtgtcctcaaccacgacgccagcgccgcgaccaccaacaccggcgcccaccatcgcgtcgcagcccctgtccctgcgcccagaggcgtgccggccagcggcggggggcgcagtgcacacgagggggctggacttcgcctgtgatatctacatctgggcgcccttggccgggacttgtggggtccttctcctgtcactggttatcaccaaacggggcagaaagaaactcctgtatatattcaaacaaccatttatgagaccagtacaaactactcaagaggaagatggctgtagctgccgatttccagaagaagaagaaggaggatgtgaactgagagtgaagttcagcaggagcgcagacgcccccgcgtacaagcagggccagaaccagctctataacgagctcaatctaggacgaagagaggagtacgatgttttggacaagaggcgtggccgggaccctgagatggggggaaagccgagaaggaagaaccctcaggaaggcctgtacaatgaactgcagaaagataagatggcggaggcctacagtgagattgggatgaaaggcgagcgccggaggggcaaggggcacgatggcctttaccagggtctcagtacagccaccaaggacacctacgacgcccttcacatgcaggccctgccccctcgctaa

SEQ ID NO: 221 - DNA, 3533 bp, Artificial Sequence
  Synthesized
atggccttaccagtgaccgccttgctcctgccgctggccttgctgctccacgccgccaggccggacatcgtgatgacccagtccccctccagcctgacagtgacagccggcgagaaggtgacaatgatctgtaagtccagccagagcctgctgaacagcggcgaccagaagaactacctgacctggtaccagcagaagcctggccagccccccaagctgctgatcttctgggccagcacaagggagagcggcgtgcccgacagattcacaggcagcggcagcggcaccgacttcacactgaccatttcctccgtgcaggccgaggacctcgccgtgtactactgccagaacgactactcctaccccctgacattcggcgccggcaccaaactggagctgaagggtggcggtggctcgggcggtggtgggtcgggtggcggcggatctcaggtgcagctccagcagtccgatgccgagctggtgaagcccggaagcagcgtcaagatcagctgtaaggcctccggctacaccttcacagaccacgccatccactgggtgaagcagaagcccgagcagggcctggagtggatcggccactttagccccggaaacaccgacatcaagtacaacgacaagttcaagggcaaggccaccctgaccgtggacaggagcagcagcaccgcctacatgcagctgaacagcctgacaagcgaggacagcgccgtgtacttctgcaagacctccaccttcttcttcgactactggggccagggaaccaccctgacagtgtccagcaccacgacgccagcgccgcgaccaccaacaccggcgcccaccatcgcgtcgcagcccctgtccctgcgcccagaggcgtgccggccagcggcggggggcgcagtgcacacgagggggctggacttcgcctgtgatatctacatctgggcgcccttggccgggacttgtggggtccttctcctgtcactggttatcaccctttactgcaaacggggcagaaagaaactcctgtatatattcaaacaaccatttatgagaccagtacaaactactcaagaggaagatggctgtagctgccgatttccagaagaagaagaaggaggatgtgaactgagagtgaagttcagcaggagcgcagacgcccccgcgtacaagcagggccagaaccagctctataacgagctcaatctaggacgaagagaggagtacgatgttttggacaagaggcgtggccgggaccctgagatggggggaaagccgagaaggaagaaccctcaggaaggcctgtacaatgaactgcagaaagataagatggcggaggcctacagtgagattgggatgaaaggcgagcgccggaggggcaaggggcacgatggcctttaccagggtctcagtacagccaccaaggacacctacgacgcccttcacatgcaggccctgccccctcgctaatctagaggcgcgcccctctccctcccccccccctaacgttactggccgaagccgcttggaataaggccggtgtgcgtttgtctatatgttattttccaccatattgccgtcttttggcaatgtgagggcccggaaacctggccctgtcttcttgacgagcattcctaggggtctttcccctctcgccaaaggaatgcaaggtctgttgaatgtcgtgaaggaagcagttcctctggaagcttcttgaagacaaacaacgtctgtagcgaccctttgcaggcagcggaaccccccacctggcgacaggtgcctctgcggccaaaagccacgtgtataagatacacctgcaaaggcggcacaaccccagtgccacgttgtgagttggatagttgtggaaagagtcaaatggctctcctcaagcgtattcaacaaggggctgaaggatgcccagaaggtaccccattgtatgggatctgatctggggcctcggtacacatgctttacatgtgtttagtcgaggttaaaaaaacgtctaggccccccgaaccacggggacgtggttttcctttgaaaaacacgatgataatatggccacaacccatatgatggccttaccagtgaccgccttgctcctgccgctggccttgctgctccacgccgccaggccggatatccagatgacccagagcccgagcagcctgagcgcgagcgtgggtgatcgcgtgaccattacctgcagggcaagtcaggacattagtaaatatttaaattggtatcagcagaaaccgggtaaagcgccgaaactgttaatttatcatacatcaagattacactcaggcgtgccgtcgcgttttagcggctcgggttcgggcaccgattttaccctgaccatctcgagcttgcagccggaggacttcgccacctactattgccaacagggtaatacgcttccgtacacgttcggtcagggcaccaaagtggagatcaaaggtggcggtggctcgggcggtggtgggtcgggtggcggcggatctgaggtgcagctggtggagtctgggggaggcttggtacagcctggggggtccctgagactctcctgtgcagcctctggagtgtccctgcctgattatggcgtgtcctgggtccgccaggctccagggaaggggctggagtgggtttcagtgatctggggcagcgagacaacctactacaacagcgccctgaagtcccgattcaccatctccagagacaatgccaagaactcactgtatctgcaaatgaacagcctgagagccgaggacacggctgtgtattactgtgcgaagcactactactacggcggcagctacgctatggactactggggccaaggaaccctggtcaccgtgtcctcaaccacgacgccagcgccgcgaccaccaacaccggcgcccaccatcgcgtcgcagcccctgtccctgcgcccagaggcgtgccggccagcggcggggggcgcagtgcacacgagggggctggacttcgcctgtgatatctacatctgggcgcccttggccgggacttgtggggtccttctcctgtcactggttatcaccctttactgcaaacggggcagaaagaaactcctgtatatattcaaacaaccatttatgagaccagtacaaactactcaagaggaagatggctgtagctgccgatttccagaagaagaagaaggaggatgtgaactgagagtgaagttcagcaggagcgcagacgcccccgcgtacaagcagggccagaaccagctctataacgagctcaatctaggacgaagagaggagtacgatgttttggacaagaggcgtggccgggaccctgagatggggggaaagccgagaaggaagaaccctcaggaaggcctgtacaatgaactgcagaaagataagatggcggaggcctacagtgagattgggatgaaaggcgagcgccggaggggcaaggggcacgatggcctttaccagggtctcagtacagccaccaaggacacctacgacgcccttcacatgcaggccctgccccctcgctaa

SEQ ID NO: 222 - DNA, 3524 bp, Artificial Sequence
  Synthesized
atggccttaccagtgaccgccttgctcctgccgctggccttgctgctccacgccgccaggccggacatcgtgatgacccagtccccctccagcctgacagtgacagccggcgagaaggtgacaatgatctgtaagtccagccagagcctgctgaacagcggcgaccagaagaactacctgacctggtaccagcagaagcctggccagccccccaagctgctgatcttctgggccagcacaagggagagcggcgtgcccgacagattcacaggcagcggcagcggcaccgacttcacactgaccatttcctccgtgcaggccgaggacctcgccgtgtactactgccagaacgactactcctaccccctgacattcggcgccggcaccaaactggagctgaagggtggcggtggctcgggcggtggtgggtcgggtggcggcggatctcaggtgcagctccagcagtccgatgccgagctggtgaagcccggaagcagcgtcaagatcagctgtaaggcctccggctacaccttcacagaccacgccatccactgggtgaagcagaagcccgagcagggcctggagtggatcggccactttagccccggaaacaccgacatcaagtacaacgacaagttcaagggcaaggccaccctgaccgtggacaggagcagcagcaccgcctacatgcagctgaacagcctgacaagcgaggacagcgccgtgtacttctgcaagacctccaccttcttcttcgactactggggccagggaaccaccctgacagtgtccagcaccacgacgccagcgccgcgaccaccaacaccggcgcccaccatcgcgtcgcagcccctgtccctgcgcccagaggcgtgccggccagcggcggggggcgcagtgcacacgagggggctggacttcgcctgtgatatctacatctgggcgcccttggccgggacttgtggggtccttctcctgtcactggttatcaccaaacggggcagaaagaaactcctgtatatattcaaacaaccatttatgagaccagtacaaactactcaagaggaagatggctgtagctgccgatttccagaagaagaagaaggaggatgtgaactgagagtgaagttcagcaggagcgcagacgcccccgcgtacaagcagggccagaaccagctctataacgagctcaatctaggacgaagagaggagtacgatgttttggacaagaggcgtggccgggaccctgagatggggggaaagccgagaaggaagaaccctcaggaaggcctgtacaatgaactgcagaaagataagatggcggaggcctacagtgagattgggatgaaaggcgagcgccggaggggcaaggggcacgatggcctttaccagggtctcagtacagccaccaaggacacctacgacgcccttcacatgcaggccctgccccctcgctaatctagaggcgcgcccctctccctcccccccccctaacgttactggccgaagccgcttggaataaggccggtgtgcgtttgtctatatgttattttccaccatattgccgtcttttggcaatgtgagggcccggaaacctggccctgtcttcttgacgagcattcctaggggtctttcccctctcgccaaaggaatgcaaggtctgttgaatgtcgtgaaggaagcagttcctctggaagcttcttgaagacaaacaacgtctgtagcgaccctttgcaggcagcggaaccccccacctggcgacaggtgcctctgcggccaaaagccacgtgtataagatacacctgcaaaggcggcacaaccccagtgccacgttgtgagttggatagttgtggaaagagtcaaatggctctcctcaagcgtattcaacaaggggctgaaggatgcccagaaggtaccccattgtatgggatctgatctggggcctcggtacacatgctttacatgtgtttagtcgaggttaaaaaaacgtctaggccccccgaaccacggggacgtggttttcctttgaaaaacacgatgataatatggccacaacccatatgatggccttaccagtgaccgccttgctcctgccgctggccttgctgctccacgccgccaggccggatatccagatgacccagagcccgagcagcctgagcgcgagcgtgggtgatcgcgtgaccattacctgcagggcaagtcaggacattagtaaatatttaaattggtatcagcagaaaccgggtaaagcgccgaaactgttaatttatcatacatcaagattacactcaggcgtgccgtcgcgttttagcggctcgggttcgggcaccgattttaccctgaccatctcgagcttgcagccggaggacttcgccacctactattgccaacagggtaatacgcttccgtacacgttcggtcagggcaccaaagtggagatcaaaggtggcggtggctcgggcggtggtgggtcgggtggcggcggatctgaggtgcagctggtggagtctgggggaggcttggtacagcctggggggtccctgagactctcctgtgcagcctctggagtgtccctgcctgattatggcgtgtcctgggtccgccaggctccagggaaggggctggagtgggtttcagtgatctggggcagcgagacaacctactacaacagcgccctgaagtcccgattcaccatctccagagacaatgccaagaactcactgtatctgcaaatgaacagcctgagagccgaggacacggctgtgtattactgtgcgaagcactactactacggcggcagctacgctatggactactggggccaaggaaccctggtcaccgtgtcctcaaccacgacgccagcgccgcgaccaccaacaccggcgcccaccatcgcgtcgcagcccctgtccctgcgcccagaggcgtgccggccagcggcggggggcgcagtgcacacgagggggctggacttcgcctgtgatatctacatctgggcgcccttggccgggacttgtggggtccttctcctgtcactggttatcaccctttactgcaaacggggcagaaagaaactcctgtatatattcaaacaaccatttatgagaccagtacaaactactcaagaggaagatggctgtagctgccgatttccagaagaagaagaaggaggatgtgaactgagagtgaagttcagcaggagcgcagacgcccccgcgtacaagcagggccagaaccagctctataacgagctcaatctaggacgaagagaggagtacgatgttttggacaagaggcgtggccgggaccctgagatggggggaaagccgagaaggaagaaccctcaggaaggcctgtacaatgaactgcagaaagataagatggcggaggcctacagtgagattgggatgaaaggcgagcgccggaggggcaaggggcacgatggcctttaccagggtctcagtacagccaccaaggacacctacgacgcccttcacatgcaggccctgccccctcgctaa

SEQ ID NO: 223 - DNA, 3524 bp, Artificial Sequence
  Synthesized
atggccttaccagtgaccgccttgctcctgccgctggccttgctgctccacgccgccaggccggacatcgtgatgacccagtccccctccagcctgacagtgacagccggcgagaaggtgacaatgatctgtaagtccagccagagcctgctgaacagcggcgaccagaagaactacctgacctggtaccagcagaagcctggccagccccccaagctgctgatcttctgggccagcacaagggagagcggcgtgcccgacagattcacaggcagcggcagcggcaccgacttcacactgaccatttcctccgtgcaggccgaggacctcgccgtgtactactgccagaacgactactcctaccccctgacattcggcgccggcaccaaactggagctgaagggtggcggtggctcgggcggtggtgggtcgggtggcggcggatctcaggtgcagctccagcagtccgatgccgagctggtgaagcccggaagcagcgtcaagatcagctgtaaggcctccggctacaccttcacagaccacgccatccactgggtgaagcagaagcccgagcagggcctggagtggatcggccactttagccccggaaacaccgacatcaagtacaacgacaagttcaagggcaaggccaccctgaccgtggacaggagcagcagcaccgcctacatgcagctgaacagcctgacaagcgaggacagcgccgtgtacttctgcaagacctccaccttcttcttcgactactggggccagggaaccaccctgacagtgtccagcaccacgacgccagcgccgcgaccaccaacaccggcgcccaccatcgcgtcgcagcccctgtccctgcgcccagaggcgtgccggccagcggcggggggcgcagtgcacacgagggggctggacttcgcctgtgatatctacatctgggcgcccttggccgggacttgtggggtccttctcctgtcactggttatcaccctttactgcaaacggggcagaaagaaactcctgtatatattcaaacaaccatttatgagaccagtacaaactactcaagaggaagatggctgtagctgccgatttccagaagaagaagaaggaggatgtgaactgagagtgaagttcagcaggagcgcagacgcccccgcgtacaagcagggccagaaccagctctataacgagctcaatctaggacgaagagaggagtacgatgttttggacaagaggcgtggccgggaccctgagatggggggaaagccgagaaggaagaaccctcaggaaggcctgtacaatgaactgcagaaagataagatggcggaggcctacagtgagattgggatgaaaggcgagcgccggaggggcaaggggcacgatggcctttaccagggtctcagtacagccaccaaggacacctacgacgcccttcacatgcaggccctgccccctcgctaatctagaggcgcgcccctctccctcccccccccctaacgttactggccgaagccgcttggaataaggccggtgtgcgtttgtctatatgttattttccaccatattgccgtcttttggcaatgtgagggcccggaaacctggccctgtcttcttgacgagcattcctaggggtctttcccctctcgccaaaggaatgcaaggtctgttgaatgtcgtgaaggaagcagttcctctggaagcttcttgaagacaaacaacgtctgtagcgaccctttgcaggcagcggaaccccccacctggcgacaggtgcctctgcggccaaaagccacgtgtataagatacacctgcaaaggcggcacaaccccagtgccacgttgtgagttggatagttgtggaaagagtcaaatggctctcctcaagcgtattcaacaaggggctgaaggatgcccagaaggtaccccattgtatgggatctgatctggggcctcggtacacatgctttacatgtgtttagtcgaggttaaaaaaacgtctaggccccccgaaccacggggacgtggttttcctttgaaaaacacgatgataatatggccacaacccatatgatggccttaccagtgaccgccttgctcctgccgctggccttgctgctccacgccgccaggccggatatccagatgacccagagcccgagcagcctgagcgcgagcgtgggtgatcgcgtgaccattacctgcagggcaagtcaggacattagtaaatatttaaattggtatcagcagaaaccgggtaaagcgccgaaactgttaatttatcatacatcaagattacactcaggcgtgccgtcgcgttttagcggctcgggttcgggcaccgattttaccctgaccatctcgagcttgcagccggaggacttcgccacctactattgccaacagggtaatacgcttccgtacacgttcggtcagggcaccaaagtggagatcaaaggtggcggtggctcgggcggtggtgggtcgggtggcggcggatctgaggtgcagctggtggagtctgggggaggcttggtacagcctggggggtccctgagactctcctgtgcagcctctggagtgtccctgcctgattatggcgtgtcctgggtccgccaggctccagggaaggggctggagtgggtttcagtgatctggggcagcgagacaacctactacaacagcgccctgaagtcccgattcaccatctccagagacaatgccaagaactcactgtatctgcaaatgaacagcctgagagccgaggacacggctgtgtattactgtgcgaagcactactactacggcggcagctacgctatggactactggggccaaggaaccctggtcaccgtgtcctcaaccacgacgccagcgccgcgaccaccaacaccggcgcccaccatcgcgtcgcagcccctgtccctgcgcccagaggcgtgccggccagcggcggggggcgcagtgcacacgagggggctggacttcgcctgtgatatctacatctgggcgcccttggccgggacttgtggggtccttctcctgtcactggttatcaccaaacggggcagaaagaaactcctgtatatattcaaacaaccatttatgagaccagtacaaactactcaagaggaagatggctgtagctgccgatttccagaagaagaagaaggaggatgtgaactgagagtgaagttcagcaggagcgcagacgcccccgcgtacaagcagggccagaaccagctctataacgagctcaatctaggacgaagagaggagtacgatgttttggacaagaggcgtggccgggaccctgagatggggggaaagccgagaaggaagaaccctcaggaaggcctgtacaatgaactgcagaaagataagatggcggaggcctacagtgagattgggatgaaaggcgagcgccggaggggcaaggggcacgatggcctttaccagggtctcagtacagccaccaaggacacctacgacgcccttcacatgcaggccctgccccctcgctaa

SEQ ID NO: 224 - DNA, 3515 bp, Artificial Sequence
  Synthesized
atggccttaccagtgaccgccttgctcctgccgctggccttgctgctccacgccgccaggccggacatcgtgatgacccagtccccctccagcctgacagtgacagccggcgagaaggtgacaatgatctgtaagtccagccagagcctgctgaacagcggcgaccagaagaactacctgacctggtaccagcagaagcctggccagccccccaagctgctgatcttctgggccagcacaagggagagcggcgtgcccgacagattcacaggcagcggcagcggcaccgacttcacactgaccatttcctccgtgcaggccgaggacctcgccgtgtactactgccagaacgactactcctaccccctgacattcggcgccggcaccaaactggagctgaagggtggcggtggctcgggcggtggtgggtcgggtggcggcggatctcaggtgcagctccagcagtccgatgccgagctggtgaagcccggaagcagcgtcaagatcagctgtaaggcctccggctacaccttcacagaccacgccatccactgggtgaagcagaagcccgagcagggcctggagtggatcggccactttagccccggaaacaccgacatcaagtacaacgacaagttcaagggcaaggccaccctgaccgtggacaggagcagcagcaccgcctacatgcagctgaacagcctgacaagcgaggacagcgccgtgtacttctgcaagacctccaccttcttcttcgactactggggccagggaaccaccctgacagtgtccagcaccacgacgccagcgccgcgaccaccaacaccggcgcccaccatcgcgtcgcagcccctgtccctgcgcccagaggcgtgccggccagcggcggggggcgcagtgcacacgagggggctggacttcgcctgtgatatctacatctgggcgcccttggccgggacttgtggggtccttctcctgtcactggttatcaccaaacggggcagaaagaaactcctgtatatattcaaacaaccatttatgagaccagtacaaactactcaagaggaagatggctgtagctgccgatttccagaagaagaagaaggaggatgtgaactgagagtgaagttcagcaggagcgcagacgcccccgcgtacaagcagggccagaaccagctctataacgagctcaatctaggacgaagagaggagtacgatgttttggacaagaggcgtggccgggaccctgagatggggggaaagccgagaaggaagaaccctcaggaaggcctgtacaatgaactgcagaaagataagatggcggaggcctacagtgagattgggatgaaaggcgagcgccggaggggcaaggggcacgatggcctttaccagggtctcagtacagccaccaaggacacctacgacgcccttcacatgcaggccctgccccctcgctaatctagaggcgcgcccctctccctcccccccccctaacgttactggccgaagccgcttggaataaggccggtgtgcgtttgtctatatgttattttccaccatattgccgtcttttggcaatgtgagggcccggaaacctggccctgtcttcttgacgagcattcctaggggtctttcccctctcgccaaaggaatgcaaggtctgttgaatgtcgtgaaggaagcagttcctctggaagcttcttgaagacaaacaacgtctgtagcgaccctttgcaggcagcggaaccccccacctggcgacaggtgcctctgcggccaaaagccacgtgtataagatacacctgcaaaggcggcacaaccccagtgccacgttgtgagttggatagttgtggaaagagtcaaatggctctcctcaagcgtattcaacaaggggctgaaggatgcccagaaggtaccccattgtatgggatctgatctggggcctcggtacacatgctttacatgtgtttagtcgaggttaaaaaaacgtctaggccccccgaaccacggggacgtggttttcctttgaaaaacacgatgataatatggccacaacccatatgatggccttaccagtgaccgccttgctcctgccgctggccttgctgctccacgccgccaggccggatatccagatgacccagagcccgagcagcctgagcgcgagcgtgggtgatcgcgtgaccattacctgcagggcaagtcaggacattagtaaatatttaaattggtatcagcagaaaccgggtaaagcgccgaaactgttaatttatcatacatcaagattacactcaggcgtgccgtcgcgttttagcggctcgggttcgggcaccgattttaccctgaccatctcgagcttgcagccggaggacttcgccacctactattgccaacagggtaatacgcttccgtacacgttcggtcagggcaccaaagtggagatcaaaggtggcggtggctcgggcggtggtgggtcgggtggcggcggatctgaggtgcagctggtggagtctgggggaggcttggtacagcctggggggtccctgagactctcctgtgcagcctctggagtgtccctgcctgattatggcgtgtcctgggtccgccaggctccagggaaggggctggagtgggtttcagtgatctggggcagcgagacaacctactacaacagcgccctgaagtcccgattcaccatctccagagacaatgccaagaactcactgtatctgcaaatgaacagcctgagagccgaggacacggctgtgtattactgtgcgaagcactactactacggcggcagctacgctatggactactggggccaaggaaccctggtcaccgtgtcctcaaccacgacgccagcgccgcgaccaccaacaccggcgcccaccatcgcgtcgcagcccctgtccctgcgcccagaggcgtgccggccagcggcggggggcgcagtgcacacgagggggctggacttcgcctgtgatatctacatctgggcgcccttggccgggacttgtggggtccttctcctgtcactggttatcaccaaacggggcagaaagaaactcctgtatatattcaaacaaccatttatgagaccagtacaaactactcaagaggaagatggctgtagctgccgatttccagaagaagaagaaggaggatgtgaactgagagtgaagttcagcaggagcgcagacgcccccgcgtacaagcagggccagaaccagctctataacgagctcaatctaggacgaagagaggagtacgatgttttggacaagaggcgtggccgggaccctgagatggggggaaagccgagaaggaagaaccctcaggaaggcctgtacaatgaactgcagaaagataagatggcggaggcctacagtgagattgggatgaaaggcgagcgccggaggggcaaggggcacgatggcctttaccagggtctcagtacagccaccaaggacacctacgacgcccttcacatgcaggccctgccccctcgctaa

SEQ ID NO: 225 - DNA, 3545 bp, Artificial Sequence
  Synthesized
atggccttaccagtgaccgccttgctcctgccgctggccttgctgctccacgccgccaggccggatattgtgatgacccagtccccgtcctccctgaccgtgaccgcgggcgaaaaagtgaccatgatttgcaaatcctcccagtccctgctgaattccggcgatcagaaaaattatctgacctggtatcagcagaaaccgggccagccgccgaaactgctgattttttgggcgtccacccgtgaatccggcgtgccggatcgttttaccggctccggctccggcaccgattttaccctgaccatttcctccgtgcaggcggaagatctggcggtgtattattgccagaatgattattcctatccgctgacctttggcgcgggcaccaaactggaactgaaaggcggcggcggctccggcggcggcggctccggcggcggcggctcccaggtgcagctgcagcagtccgatgcggaactggtgaaaccgggctcctccgtgaaaatttcctgcaaagcgtccggctatacctttaccgatcatgcgattcattgggtgaaacagaaaccggaacagggcctggaatggattggccatttttccccgggcaataccgatattaaatataatgataaatttaaaggcaaagcgaccctgaccgtggatcgttcctcctccaccgcgtatatgcagctgaattccctgacctccgaagattccgcggtgtatttttgcaaaacctccacctttttttttgattattggggccagggcaccaccctgaccgtgtcctccaccacgacgccagcgccgcgaccaccaacaccggcgcccaccatcgcgtcgcagcccctgtccctgcgcccagaggcgtgccggccagcggcggggggcgcagtgcacacgagggggctggacttcgcctgtgatatctacatctgggcgcccttggccgggacttgtggggtccttctcctgtcactggttatcaccctttactgcaaacggggcagaaagaaactcctgtatatattcaaacaaccatttatgagaccagtacaaactactcaagaggaagatggctgtagctgccgatttccagaagaagaagaaggaggatgtgaactgagagtgaagttcagcaggagcgcagacgcccccgcgtacaagcagggccagaaccagctctataacgagctcaatctaggacgaagagaggagtacgatgttttggacaagaggcgtggccgggaccctgagatggggggaaagccgagaaggaagaaccctcaggaaggcctgtacaatgaactgcagaaagataagatggcggaggcctacagtgagattgggatgaaaggcgagcgccggaggggcaaggggcacgatggcctttaccagggtctcagtacagccaccaaggacacctacgacgcccttcacatgcaggccctgccccctcgctaatctagaggcgcgcccctctccctcccccccccctaacgttactggccgaagccgcttggaataaggccggtgtgcgtttgtctatatgttattttccaccatattgccgtcttttggcaatgtgagggcccggaaacctggccctgtcttcttgacgagcattcctaggggtctttcccctctcgccaaaggaatgcaaggtctgttgaatgtcgtgaaggaagcagttcctctggaagcttcttgaagacaaacaacgtctgtagcgaccctttgcaggcagcggaaccccccacctggcgacaggtgcctctgcggccaaaagccacgtgtataagatacacctgcaaaggcggcacaaccccagtgccacgttgtgagttggatagttgtggaaagagtcaaatggctctcctcaagcgtattcaacaaggggctgaaggatgcccagaaggtaccccattgtatgggatctgatctggggcctcggtacacatgctttacatgtgtttagtcgaggttaaaaaaacgtctaggccccccgaaccacggggacgtggttttcctttgaaaaacacgatgataatatggccacaacccatatgatggccttaccagtgaccgccttgctcctgccgctggccttgctgctccacgccgccaggccggatatccagatgacccagagcccaagctccctgtccgcctctgtgggcgacagggtgaccatcacatgccgcgccagccagacaatctggtcctacctgaactggtatcagcagagacccggcaaggcccctaatctgctgatctacgcagcatctagcctgcagtctggagtgccctcccggttctctggaagaggatccggaaccgacttcaccctgacaatctcctctctgcaggccgaggacttcgccacatactattgccagcagagctattccatccctcagacctttggccagggcacaaagctggagatcaagggcggcggcggctctggaggaggaggaagcggaggaggaggatcccaggtgcagctgcagcagagcggaccaggactggtgaagccctcccagaccctgtctctgacatgtgccatcagcggcgattccgtgagctccaacagcgccgcctggaattggatccggcagtctcccagcagaggactggagtggctgggaaggacctactatcgctccaagtggtacaacgattatgccgtgtctgtgaagagccggatcaccatcaaccctgacacatctaagaatcagttcagcctgcagctgaattccgtgaccccagaggacacagccgtgtactattgtgcaagggaggtgaccggcgacctggaggatgcctttgacatctggggccagggcaccatggtgacagtgtctagcaccacgacgccagcgccgcgaccaccaacaccggcgcccaccatcgcgtcgcagcccctgtccctgcgcccagaggcgtgccggccagcggcggggggcgcagtgcacacgagggggctggacttcgcctgtgatatctacatctgggcgcccttggccgggacttgtggggtccttctcctgtcactggttatcaccctttactgcaaacggggcagaaagaaactcctgtatatattcaaacaaccatttatgagaccagtacaaactactcaagaggaagatggctgtagctgccgatttccagaagaagaagaaggaggatgtgaactgagagtgaagttcagcaggagcgcagacgcccccgcgtacaagcagggccagaaccagctctataacgagctcaatctaggacgaagagaggagtacgatgttttggacaagaggcgtggccgggaccctgagatggggggaaagccgagaaggaagaaccctcaggaaggcctgtacaatgaactgcagaaagataagatggcggaggcctacagtgagattgggatgaaaggcgagcgccggaggggcaaggggcacgatggcctttaccagggtctcagtacagccaccaaggacacctacgacgcccttcacatgcaggccctgccccctcgctaa

SEQ ID NO: 226 - protein, 490 aa, Artificial Sequence
  Synthesized
MALPVTALLLPLALLLHAARPDIQMTQSPSSLSASVGDRVTITCRASQTIWSYLNWYQQRPGKAPNLLIYAASSLQSGVPSRFSGRGSGTDFTLTISSLQAEDFATYYCQQSYSIPQTFGQGTKLEIKGGGGSGGGGSGGGGSQVQLQQSGPGLVKPSQTLSLTCAISGDSVSSNSAAWNWIRQSPSRGLEWLGRTYYRSKWYNDYAVSVKSRITINPDTSKNQFSLQLNSVTPEDTAVYYCAREVTGDLEDAFDIWGQGTMVTVSSTTTPAPRPPTPAPTIASQPLSLRPEACRPAAGGAVHTRGLDFACDIYIWAPLAGTCGVLLLSLVITLYCKRGRKKLLYIFKQPFMRPVQTTQEEDGCSCRFPEEEEGGCELRVKFSRSADAPAYQQGQNQLYNELNLGRREEYDVLDKRRGRDPEMGGKPRRKNPQEGLYNELQKDKMAEAYSEIGMKGERRRGKGHDGLYQGLSTATKDTYDALHMQALPPR

SEQ ID NO: 227 - DNA, 3536 bp, Artificial Sequence
  Synthesized
atggccttaccagtgaccgccttgctcctgccgctggccttgctgctccacgccgccaggccggatattgtgatgacccagtccccgtcctccctgaccgtgaccgcgggcgaaaaagtgaccatgatttgcaaatcctcccagtccctgctgaattccggcgatcagaaaaattatctgacctggtatcagcagaaaccgggccagccgccgaaactgctgattttttgggcgtccacccgtgaatccggcgtgccggatcgttttaccggctccggctccggcaccgattttaccctgaccatttcctccgtgcaggcggaagatctggcggtgtattattgccagaatgattattcctatccgctgacctttggcgcgggcaccaaactggaactgaaaggcggcggcggctccggcggcggcggctccggcggcggcggctcccaggtgcagctgcagcagtccgatgcggaactggtgaaaccgggctcctccgtgaaaatttcctgcaaagcgtccggctatacctttaccgatcatgcgattcattgggtgaaacagaaaccggaacagggcctggaatggattggccatttttccccgggcaataccgatattaaatataatgataaatttaaaggcaaagcgaccctgaccgtggatcgttcctcctccaccgcgtatatgcagctgaattccctgacctccgaagattccgcggtgtatttttgcaaaacctccacctttttttttgattattggggccagggcaccaccctgaccgtgtcctccaccacgacgccagcgccgcgaccaccaacaccggcgcccaccatcgcgtcgcagcccctgtccctgcgcccagaggcgtgccggccagcggcggggggcgcagtgcacacgagggggctggacttcgcctgtgatatctacatctgggcgcccttggccgggacttgtggggtccttctcctgtcactggttatcaccaaacggggcagaaagaaactcctgtatatattcaaacaaccatttatgagaccagtacaaactactcaagaggaagatggctgtagctgccgatttccagaagaagaagaaggaggatgtgaactgagagtgaagttcagcaggagcgcagacgcccccgcgtacaagcagggccagaaccagctctataacgagctcaatctaggacgaagagaggagtacgatgttttggacaagaggcgtggccgggaccctgagatggggggaaagccgagaaggaagaaccctcaggaaggcctgtacaatgaactgcagaaagataagatggcggaggcctacagtgagattgggatgaaaggcgagcgccggaggggcaaggggcacgatggcctttaccagggtctcagtacagccaccaaggacacctacgacgcccttcacatgcaggccctgccccctcgctaatctagaggcgcgcccctctccctcccccccccctaacgttactggccgaagccgcttggaataaggccggtgtgcgtttgtctatatgttattttccaccatattgccgtcttttggcaatgtgagggcccggaaacctggccctgtcttcttgacgagcattcctaggggtctttcccctctcgccaaaggaatgcaaggtctgttgaatgtcgtgaaggaagcagttcctctggaagcttcttgaagacaaacaacgtctgtagcgaccctttgcaggcagcggaaccccccacctggcgacaggtgcctctgcggccaaaagccacgtgtataagatacacctgcaaaggcggcacaaccccagtgccacgttgtgagttggatagttgtggaaagagtcaaatggctctcctcaagcgtattcaacaaggggctgaaggatgcccagaaggtaccccattgtatgggatctgatctggggcctcggtacacatgctttacatgtgtttagtcgaggttaaaaaaacgtctaggccccccgaaccacggggacgtggttttcctttgaaaaacacgatgataatatggccacaacccatatgatggccttaccagtgaccgccttgctcctgccgctggccttgctgctccacgccgccaggccggatatccagatgacccagagcccaagctccctgtccgcctctgtgggcgacagggtgaccatcacatgccgcgccagccagacaatctggtcctacctgaactggtatcagcagagacccggcaaggcccctaatctgctgatctacgcagcatctagcctgcagtctggagtgccctcccggttctctggaagaggatccggaaccgacttcaccctgacaatctcctctctgcaggccgaggacttcgccacatactattgccagcagagctattccatccctcagacctttggccagggcacaaagctggagatcaagggcggcggcggctctggaggaggaggaagcggaggaggaggatcccaggtgcagctgcagcagagcggaccaggactggtgaagccctcccagaccctgtctctgacatgtgccatcagcggcgattccgtgagctccaacagcgccgcctggaattggatccggcagtctcccagcagaggactggagtggctgggaaggacctactatcgctccaagtggtacaacgattatgccgtgtctgtgaagagccggatcaccatcaaccctgacacatctaagaatcagttcagcctgcagctgaattccgtgaccccagaggacacagccgtgtactattgtgcaagggaggtgaccggcgacctggaggatgcctttgacatctggggccagggcaccatggtgacagtgtctagcaccacgacgccagcgccgcgaccaccaacaccggcgcccaccatcgcgtcgcagcccctgtccctgcgcccagaggcgtgccggccagcggcggggggcgcagtgcacacgagggggctggacttcgcctgtgatatctacatctgggcgcccttggccgggacttgtggggtccttctcctgtcactggttatcaccctttactgcaaacggggcagaaagaaactcctgtatatattcaaacaaccatttatgagaccagtacaaactactcaagaggaagatggctgtagctgccgatttccagaagaagaagaaggaggatgtgaactgagagtgaagttcagcaggagcgcagacgcccccgcgtacaagcagggccagaaccagctctataacgagctcaatctaggacgaagagaggagtacgatgttttggacaagaggcgtggccgggaccctgagatggggggaaagccgagaaggaagaaccctcaggaaggcctgtacaatgaactgcagaaagataagatggcggaggcctacagtgagattgggatgaaaggcgagcgccggaggggcaaggggcacgatggcctttaccagggtctcagtacagccaccaaggacacctacgacgcccttcacatgcaggccctgccccctcgctaa

SEQ ID NO: 228 - DNA, 3536 bp, Artificial Sequence
  Synthesized
atggccttaccagtgaccgccttgctcctgccgctggccttgctgctccacgccgccaggccggatattgtgatgacccagtccccgtcctccctgaccgtgaccgcgggcgaaaaagtgaccatgatttgcaaatcctcccagtccctgctgaattccggcgatcagaaaaattatctgacctggtatcagcagaaaccgggccagccgccgaaactgctgattttttgggcgtccacccgtgaatccggcgtgccggatcgttttaccggctccggctccggcaccgattttaccctgaccatttcctccgtgcaggcggaagatctggcggtgtattattgccagaatgattattcctatccgctgacctttggcgcgggcaccaaactggaactgaaaggcggcggcggctccggcggcggcggctccggcggcggcggctcccaggtgcagctgcagcagtccgatgcggaactggtgaaaccgggctcctccgtgaaaatttcctgcaaagcgtccggctatacctttaccgatcatgcgattcattgggtgaaacagaaaccggaacagggcctggaatggattggccatttttccccgggcaataccgatattaaatataatgataaatttaaaggcaaagcgaccctgaccgtggatcgttcctcctccaccgcgtatatgcagctgaattccctgacctccgaagattccgcggtgtatttttgcaaaacctccacctttttttttgattattggggccagggcaccaccctgaccgtgtcctccaccacgacgccagcgccgcgaccaccaacaccggcgcccaccatcgcgtcgcagcccctgtccctgcgcccagaggcgtgccggccagcggcggggggcgcagtgcacacgagggggctggacttcgcctgtgatatctacatctgggcgcccttggccgggacttgtggggtccttctcctgtcactggttatcaccctttactgcaaacggggcagaaagaaactcctgtatatattcaaacaaccatttatgagaccagtacaaactactcaagaggaagatggctgtagctgccgatttccagaagaagaagaaggaggatgtgaactgagagtgaagttcagcaggagcgcagacgcccccgcgtacaagcagggccagaaccagctctataacgagctcaatctaggacgaagagaggagtacgatgttttggacaagaggcgtggccgggaccctgagatggggggaaagccgagaaggaagaaccctcaggaaggcctgtacaatgaactgcagaaagataagatggcggaggcctacagtgagattgggatgaaaggcgagcgccggaggggcaaggggcacgatggcctttaccagggtctcagtacagccaccaaggacacctacgacgcccttcacatgcaggccctgccccctcgctaatctagaggcgcgcccctctccctcccccccccctaacgttactggccgaagccgcttggaataaggccggtgtgcgtttgtctatatgttattttccaccatattgccgtcttttggcaatgtgagggcccggaaacctggccctgtcttcttgacgagcattcctaggggtctttcccctctcgccaaaggaatgcaaggtctgttgaatgtcgtgaaggaagcagttcctctggaagcttcttgaagacaaacaacgtctgtagcgaccctttgcaggcagcggaaccccccacctggcgacaggtgcctctgcggccaaaagccacgtgtataagatacacctgcaaaggcggcacaaccccagtgccacgttgtgagttggatagttgtggaaagagtcaaatggctctcctcaagcgtattcaacaaggggctgaaggatgcccagaaggtaccccattgtatgggatctgatctggggcctcggtacacatgctttacatgtgtttagtcgaggttaaaaaaacgtctaggccccccgaaccacggggacgtggttttcctttgaaaaacacgatgataatatggccacaacccatatgatggccttaccagtgaccgccttgctcctgccgctggccttgctgctccacgccgccaggccggatatccagatgacccagagcccaagctccctgtccgcctctgtgggcgacagggtgaccatcacatgccgcgccagccagacaatctggtcctacctgaactggtatcagcagagacccggcaaggcccctaatctgctgatctacgcagcatctagcctgcagtctggagtgccctcccggttctctggaagaggatccggaaccgacttcaccctgacaatctcctctctgcaggccgaggacttcgccacatactattgccagcagagctattccatccctcagacctttggccagggcacaaagctggagatcaagggcggcggcggctctggaggaggaggaagcggaggaggaggatcccaggtgcagctgcagcagagcggaccaggactggtgaagccctcccagaccctgtctctgacatgtgccatcagcggcgattccgtgagctccaacagcgccgcctggaattggatccggcagtctcccagcagaggactggagtggctgggaaggacctactatcgctccaagtggtacaacgattatgccgtgtctgtgaagagccggatcaccatcaaccctgacacatctaagaatcagttcagcctgcagctgaattccgtgaccccagaggacacagccgtgtactattgtgcaagggaggtgaccggcgacctggaggatgcctttgacatctggggccagggcaccatggtgacagtgtctagcaccacgacgccagcgccgcgaccaccaacaccggcgcccaccatcgcgtcgcagcccctgtccctgcgcccagaggcgtgccggccagcggcggggggcgcagtgcacacgagggggctggacttcgcctgtgatatctacatctgggcgcccttggccgggacttgtggggtccttctcctgtcactggttatcaccaaacggggcagaaagaaactcctgtatatattcaaacaaccatttatgagaccagtacaaactactcaagaggaagatggctgtagctgccgatttccagaagaagaagaaggaggatgtgaactgagagtgaagttcagcaggagcgcagacgcccccgcgtacaagcagggccagaaccagctctataacgagctcaatctaggacgaagagaggagtacgatgttttggacaagaggcgtggccgggaccctgagatggggggaaagccgagaaggaagaaccctcaggaaggcctgtacaatgaactgcagaaagataagatggcggaggcctacagtgagattgggatgaaaggcgagcgccggaggggcaaggggcacgatggcctttaccagggtctcagtacagccaccaaggacacctacgacgcccttcacatgcaggccctgccccctcgctaa

SEQ ID NO: 229 - protein, 487 aa, Artificial Sequence
  Synthesized
MALPVTALLLPLALLLHAARPDIQMTQSPSSLSASVGDRVTITCRASQTIWSYLNWYQQRPGKAPNLLIYAASSLQSGVPSRFSGRGSGTDFTLTISSLQAEDFATYYCQQSYSIPQTFGQGTKLEIKGGGGSGGGGSGGGGSQVQLQQSGPGLVKPSQTLSLTCAISGDSVSSNSAAWNWIRQSPSRGLEWLGRTYYRSKWYNDYAVSVKSRITINPDTSKNQFSLQLNSVTPEDTAVYYCAREVTGDLEDAFDIWGQGTMVTVSSTTTPAPRPPTPAPTIASQPLSLRPEACRPAAGGAVHTRGLDFACDIYIWAPLAGTCGVLLLSLVITKRGRKKLLYIFKQPFMRPVQTTQEEDGCSCRFPEEEEGGCELRVKFSRSADAPAYQQGQNQLYNELNLGRREEYDVLDKRRGRDPEMGGKPRRKNPQEGLYNELQKDKMAEAYSEIGMKGERRRGKGHDGLYQGLSTATKDTYDALHMQALPPR

SEQ ID NO: 230 - DNA, 3527 bp, Artificial Sequence
  Synthesized
atggccttaccagtgaccgccttgctcctgccgctggccttgctgctccacgccgccaggccggatattgtgatgacccagtccccgtcctccctgaccgtgaccgcgggcgaaaaagtgaccatgatttgcaaatcctcccagtccctgctgaattccggcgatcagaaaaattatctgacctggtatcagcagaaaccgggccagccgccgaaactgctgattttttgggcgtccacccgtgaatccggcgtgccggatcgttttaccggctccggctccggcaccgattttaccctgaccatttcctccgtgcaggcggaagatctggcggtgtattattgccagaatgattattcctatccgctgacctttggcgcgggcaccaaactggaactgaaaggcggcggcggctccggcggcggcggctccggcggcggcggctcccaggtgcagctgcagcagtccgatgcggaactggtgaaaccgggctcctccgtgaaaatttcctgcaaagcgtccggctatacctttaccgatcatgcgattcattgggtgaaacagaaaccggaacagggcctggaatggattggccatttttccccgggcaataccgatattaaatataatgataaatttaaaggcaaagcgaccctgaccgtggatcgttcctcctccaccgcgtatatgcagctgaattccctgacctccgaagattccgcggtgtatttttgcaaaacctccacctttttttttgattattggggccagggcaccaccctgaccgtgtcctccaccacgacgccagcgccgcgaccaccaacaccggcgcccaccatcgcgtcgcagcccctgtccctgcgcccagaggcgtgccggccagcggcggggggcgcagtgcacacgagggggctggacttcgcctgtgatatctacatctgggcgcccttggccgggacttgtggggtccttctcctgtcactggttatcaccaaacggggcagaaagaaactcctgtatatattcaaacaaccatttatgagaccagtacaaactactcaagaggaagatggctgtagctgccgatttccagaagaagaagaaggaggatgtgaactgagagtgaagttcagcaggagcgcagacgcccccgcgtacaagcagggccagaaccagctctataacgagctcaatctaggacgaagagaggagtacgatgttttggacaagaggcgtggccgggaccctgagatggggggaaagccgagaaggaagaaccctcaggaaggcctgtacaatgaactgcagaaagataagatggcggaggcctacagtgagattgggatgaaaggcgagcgccggaggggcaaggggcacgatggcctttaccagggtctcagtacagccaccaaggacacctacgacgcccttcacatgcaggccctgccccctcgctaatctagaggcgcgcccctctccctcccccccccctaacgttactggccgaagccgcttggaataaggccggtgtgcgtttgtctatatgttattttccaccatattgccgtcttttggcaatgtgagggcccggaaacctggccctgtcttcttgacgagcattcctaggggtctttcccctctcgccaaaggaatgcaaggtctgttgaatgtcgtgaaggaagcagttcctctggaagcttcttgaagacaaacaacgtctgtagcgaccctttgcaggcagcggaaccccccacctggcgacaggtgcctctgcggccaaaagccacgtgtataagatacacctgcaaaggcggcacaaccccagtgccacgttgtgagttggatagttgtggaaagagtcaaatggctctcctcaagcgtattcaacaaggggctgaaggatgcccagaaggtaccccattgtatgggatctgatctggggcctcggtacacatgctttacatgtgtttagtcgaggttaaaaaaacgtctaggccccccgaaccacggggacgtggttttcctttgaaaaacacgatgataatatggccacaacccatatgatggccttaccagtgaccgccttgctcctgccgctggccttgctgctccacgccgccaggccggatatccagatgacccagagcccaagctccctgtccgcctctgtgggcgacagggtgaccatcacatgccgcgccagccagacaatctggtcctacctgaactggtatcagcagagacccggcaaggcccctaatctgctgatctacgcagcatctagcctgcagtctggagtgccctcccggttctctggaagaggatccggaaccgacttcaccctgacaatctcctctctgcaggccgaggacttcgccacatactattgccagcagagctattccatccctcagacctttggccagggcacaaagctggagatcaagggcggcggcggctctggaggaggaggaagcggaggaggaggatcccaggtgcagctgcagcagagcggaccaggactggtgaagccctcccagaccctgtctctgacatgtgccatcagcggcgattccgtgagctccaacagcgccgcctggaattggatccggcagtctcccagcagaggactggagtggctgggaaggacctactatcgctccaagtggtacaacgattatgccgtgtctgtgaagagccggatcaccatcaaccctgacacatctaagaatcagttcagcctgcagctgaattccgtgaccccagaggacacagccgtgtactattgtgcaagggaggtgaccggcgacctggaggatgcctttgacatctggggccagggcaccatggtgacagtgtctagcaccacgacgccagcgccgcgaccaccaacaccggcgcccaccatcgcgtcgcagcccctgtccctgcgcccagaggcgtgccggccagcggcggggggcgcagtgcacacgagggggctggacttcgcctgtgatatctacatctgggcgcccttggccgggacttgtggggtccttctcctgtcactggttatcaccaaacggggcagaaagaaactcctgtatatattcaaacaaccatttatgagaccagtacaaactactcaagaggaagatggctgtagctgccgatttccagaagaagaagaaggaggatgtgaactgagagtgaagttcagcaggagcgcagacgcccccgcgtacaagcagggccagaaccagctctataacgagctcaatctaggacgaagagaggagtacgatgttttggacaagaggcgtggccgggaccctgagatggggggaaagccgagaaggaagaaccctcaggaaggcctgtacaatgaactgcagaaagataagatggcggaggcctacagtgagattgggatgaaaggcgagcgccggaggggcaaggggcacgatggcctttaccagggtctcagtacagccaccaaggacacctacgacgcccttcacatgcaggccctgccccctcgctaa

SEQ ID NO: 231 - DNA, 3545 bp, Artificial Sequence
  Synthesized
atggccttaccagtgaccgccttgctcctgccgctggccttgctgctccacgccgccaggccggacatcgtgatgacccagtccccctccagcctgacagtgacagccggcgagaaggtgacaatgatctgtaagtccagccagagcctgctgaacagcggcgaccagaagaactacctgacctggtaccagcagaagcctggccagccccccaagctgctgatcttctgggccagcacaagggagagcggcgtgcccgacagattcacaggcagcggcagcggcaccgacttcacactgaccatttcctccgtgcaggccgaggacctcgccgtgtactactgccagaacgactactcctaccccctgacattcggcgccggcaccaaactggagctgaagggtggcggtggctcgggcggtggtgggtcgggtggcggcggatctcaggtgcagctccagcagtccgatgccgagctggtgaagcccggaagcagcgtcaagatcagctgtaaggcctccggctacaccttcacagaccacgccatccactgggtgaagcagaagcccgagcagggcctggagtggatcggccactttagccccggaaacaccgacatcaagtacaacgacaagttcaagggcaaggccaccctgaccgtggacaggagcagcagcaccgcctacatgcagctgaacagcctgacaagcgaggacagcgccgtgtacttctgcaagacctccaccttcttcttcgactactggggccagggaaccaccctgacagtgtccagcaccacgacgccagcgccgcgaccaccaacaccggcgcccaccatcgcgtcgcagcccctgtccctgcgcccagaggcgtgccggccagcggcggggggcgcagtgcacacgagggggctggacttcgcctgtgatatctacatctgggcgcccttggccgggacttgtggggtccttctcctgtcactggttatcaccctttactgcaaacggggcagaaagaaactcctgtatatattcaaacaaccatttatgagaccagtacaaactactcaagaggaagatggctgtagctgccgatttccagaagaagaagaaggaggatgtgaactgagagtgaagttcagcaggagcgcagacgcccccgcgtacaagcagggccagaaccagctctataacgagctcaatctaggacgaagagaggagtacgatgttttggacaagaggcgtggccgggaccctgagatggggggaaagccgagaaggaagaaccctcaggaaggcctgtacaatgaactgcagaaagataagatggcggaggcctacagtgagattgggatgaaaggcgagcgccggaggggcaaggggcacgatggcctttaccagggtctcagtacagccaccaaggacacctacgacgcccttcacatgcaggccctgccccctcgctaatctagaggcgcgcccctctccctcccccccccctaacgttactggccgaagccgcttggaataaggccggtgtgcgtttgtctatatgttattttccaccatattgccgtcttttggcaatgtgagggcccggaaacctggccctgtcttcttgacgagcattcctaggggtctttcccctctcgccaaaggaatgcaaggtctgttgaatgtcgtgaaggaagcagttcctctggaagcttcttgaagacaaacaacgtctgtagcgaccctttgcaggcagcggaaccccccacctggcgacaggtgcctctgcggccaaaagccacgtgtataagatacacctgcaaaggcggcacaaccccagtgccacgttgtgagttggatagttgtggaaagagtcaaatggctctcctcaagcgtattcaacaaggggctgaaggatgcccagaaggtaccccattgtatgggatctgatctggggcctcggtacacatgctttacatgtgtttagtcgaggttaaaaaaacgtctaggccccccgaaccacggggacgtggttttcctttgaaaaacacgatgataatatggccacaacccatatgatggccttaccagtgaccgccttgctcctgccgctggccttgctgctccacgccgccaggccggatatccagatgacccagagcccaagctccctgtccgcctctgtgggcgacagggtgaccatcacatgccgcgccagccagacaatctggtcctacctgaactggtatcagcagagacccggcaaggcccctaatctgctgatctacgcagcatctagcctgcagtctggagtgccctcccggttctctggaagaggatccggaaccgacttcaccctgacaatctcctctctgcaggccgaggacttcgccacatactattgccagcagagctattccatccctcagacctttggccagggcacaaagctggagatcaagggcggcggcggctctggaggaggaggaagcggaggaggaggatcccaggtgcagctgcagcagagcggaccaggactggtgaagccctcccagaccctgtctctgacatgtgccatcagcggcgattccgtgagctccaacagcgccgcctggaattggatccggcagtctcccagcagaggactggagtggctgggaaggacctactatcgctccaagtggtacaacgattatgccgtgtctgtgaagagccggatcaccatcaaccctgacacatctaagaatcagttcagcctgcagctgaattccgtgaccccagaggacacagccgtgtactattgtgcaagggaggtgaccggcgacctggaggatgcctttgacatctggggccagggcaccatggtgacagtgtctagcaccacgacgccagcgccgcgaccaccaacaccggcgcccaccatcgcgtcgcagcccctgtccctgcgcccagaggcgtgccggccagcggcggggggcgcagtgcacacgagggggctggacttcgcctgtgatatctacatctgggcgcccttggccgggacttgtggggtccttctcctgtcactggttatcaccctttactgcaaacggggcagaaagaaactcctgtatatattcaaacaaccatttatgagaccagtacaaactactcaagaggaagatggctgtagctgccgatttccagaagaagaagaaggaggatgtgaactgagagtgaagttcagcaggagcgcagacgcccccgcgtacaagcagggccagaaccagctctataacgagctcaatctaggacgaagagaggagtacgatgttttggacaagaggcgtggccgggaccctgagatggggggaaagccgagaaggaagaaccctcaggaaggcctgtacaatgaactgcagaaagataagatggcggaggcctacagtgagattgggatgaaaggcgagcgccggaggggcaaggggcacgatggcctttaccagggtctcagtacagccaccaaggacacctacgacgcccttcacatgcaggccctgccccctcgctaa

SEQ ID NO: 232 - DNA, 3536 bp, Artificial Sequence
  Synthesized
atggccttaccagtgaccgccttgctcctgccgctggccttgctgctccacgccgccaggccggacatcgtgatgacccagtccccctccagcctgacagtgacagccggcgagaaggtgacaatgatctgtaagtccagccagagcctgctgaacagcggcgaccagaagaactacctgacctggtaccagcagaagcctggccagccccccaagctgctgatcttctgggccagcacaagggagagcggcgtgcccgacagattcacaggcagcggcagcggcaccgacttcacactgaccatttcctccgtgcaggccgaggacctcgccgtgtactactgccagaacgactactcctaccccctgacattcggcgccggcaccaaactggagctgaagggtggcggtggctcgggcggtggtgggtcgggtggcggcggatctcaggtgcagctccagcagtccgatgccgagctggtgaagcccggaagcagcgtcaagatcagctgtaaggcctccggctacaccttcacagaccacgccatccactgggtgaagcagaagcccgagcagggcctggagtggatcggccactttagccccggaaacaccgacatcaagtacaacgacaagttcaagggcaaggccaccctgaccgtggacaggagcagcagcaccgcctacatgcagctgaacagcctgacaagcgaggacagcgccgtgtacttctgcaagacctccaccttcttcttcgactactggggccagggaaccaccctgacagtgtccagcaccacgacgccagcgccgcgaccaccaacaccggcgcccaccatcgcgtcgcagcccctgtccctgcgcccagaggcgtgccggccagcggcggggggcgcagtgcacacgagggggctggacttcgcctgtgatatctacatctgggcgcccttggccgggacttgtggggtccttctcctgtcactggttatcaccaaacggggcagaaagaaactcctgtatatattcaaacaaccatttatgagaccagtacaaactactcaagaggaagatggctgtagctgccgatttccagaagaagaagaaggaggatgtgaactgagagtgaagttcagcaggagcgcagacgcccccgcgtacaagcagggccagaaccagctctataacgagctcaatctaggacgaagagaggagtacgatgttttggacaagaggcgtggccgggaccctgagatggggggaaagccgagaaggaagaaccctcaggaaggcctgtacaatgaactgcagaaagataagatggcggaggcctacagtgagattgggatgaaaggcgagcgccggaggggcaaggggcacgatggcctttaccagggtctcagtacagccaccaaggacacctacgacgcccttcacatgcaggccctgccccctcgctaatctagaggcgcgcccctctccctcccccccccctaacgttactggccgaagccgcttggaataaggccggtgtgcgtttgtctatatgttattttccaccatattgccgtcttttggcaatgtgagggcccggaaacctggccctgtcttcttgacgagcattcctaggggtctttcccctctcgccaaaggaatgcaaggtctgttgaatgtcgtgaaggaagcagttcctctggaagcttcttgaagacaaacaacgtctgtagcgaccctttgcaggcagcggaaccccccacctggcgacaggtgcctctgcggccaaaagccacgtgtataagatacacctgcaaaggcggcacaaccccagtgccacgttgtgagttggatagttgtggaaagagtcaaatggctctcctcaagcgtattcaacaaggggctgaaggatgcccagaaggtaccccattgtatgggatctgatctggggcctcggtacacatgctttacatgtgtttagtcgaggttaaaaaaacgtctaggccccccgaaccacggggacgtggttttcctttgaaaaacacgatgataatatggccacaacccatatgatggccttaccagtgaccgccttgctcctgccgctggccttgctgctccacgccgccaggccggatatccagatgacccagagcccaagctccctgtccgcctctgtgggcgacagggtgaccatcacatgccgcgccagccagacaatctggtcctacctgaactggtatcagcagagacccggcaaggcccctaatctgctgatctacgcagcatctagcctgcagtctggagtgccctcccggttctctggaagaggatccggaaccgacttcaccctgacaatctcctctctgcaggccgaggacttcgccacatactattgccagcagagctattccatccctcagacctttggccagggcacaaagctggagatcaagggcggcggcggctctggaggaggaggaagcggaggaggaggatcccaggtgcagctgcagcagagcggaccaggactggtgaagccctcccagaccctgtctctgacatgtgccatcagcggcgattccgtgagctccaacagcgccgcctggaattggatccggcagtctcccagcagaggactggagtggctgggaaggacctactatcgctccaagtggtacaacgattatgccgtgtctgtgaagagccggatcaccatcaaccctgacacatctaagaatcagttcagcctgcagctgaattccgtgaccccagaggacacagccgtgtactattgtgcaagggaggtgaccggcgacctggaggatgcctttgacatctggggccagggcaccatggtgacagtgtctagcaccacgacgccagcgccgcgaccaccaacaccggcgcccaccatcgcgtcgcagcccctgtccctgcgcccagaggcgtgccggccagcggcggggggcgcagtgcacacgagggggctggacttcgcctgtgatatctacatctgggcgcccttggccgggacttgtggggtccttctcctgtcactggttatcaccctttactgcaaacggggcagaaagaaactcctgtatatattcaaacaaccatttatgagaccagtacaaactactcaagaggaagatggctgtagctgccgatttccagaagaagaagaaggaggatgtgaactgagagtgaagttcagcaggagcgcagacgcccccgcgtacaagcagggccagaaccagctctataacgagctcaatctaggacgaagagaggagtacgatgttttggacaagaggcgtggccgggaccctgagatggggggaaagccgagaaggaagaaccctcaggaaggcctgtacaatgaactgcagaaagataagatggcggaggcctacagtgagattgggatgaaaggcgagcgccggaggggcaaggggcacgatggcctttaccagggtctcagtacagccaccaaggacacctacgacgcccttcacatgcaggccctgccccctcgctaa

SEQ ID NO: 233 - DNA, 3536 bp, Artificial Sequence
  Synthesized
atggccttaccagtgaccgccttgctcctgccgctggccttgctgctccacgccgccaggccggacatcgtgatgacccagtccccctccagcctgacagtgacagccggcgagaaggtgacaatgatctgtaagtccagccagagcctgctgaacagcggcgaccagaagaactacctgacctggtaccagcagaagcctggccagccccccaagctgctgatcttctgggccagcacaagggagagcggcgtgcccgacagattcacaggcagcggcagcggcaccgacttcacactgaccatttcctccgtgcaggccgaggacctcgccgtgtactactgccagaacgactactcctaccccctgacattcggcgccggcaccaaactggagctgaagggtggcggtggctcgggcggtggtgggtcgggtggcggcggatctcaggtgcagctccagcagtccgatgccgagctggtgaagcccggaagcagcgtcaagatcagctgtaaggcctccggctacaccttcacagaccacgccatccactgggtgaagcagaagcccgagcagggcctggagtggatcggccactttagccccggaaacaccgacatcaagtacaacgacaagttcaagggcaaggccaccctgaccgtggacaggagcagcagcaccgcctacatgcagctgaacagcctgacaagcgaggacagcgccgtgtacttctgcaagacctccaccttcttcttcgactactggggccagggaaccaccctgacagtgtccagcaccacgacgccagcgccgcgaccaccaacaccggcgcccaccatcgcgtcgcagcccctgtccctgcgcccagaggcgtgccggccagcggcggggggcgcagtgcacacgagggggctggacttcgcctgtgatatctacatctgggcgcccttggccgggacttgtggggtccttctcctgtcactggttatcaccctttactgcaaacggggcagaaagaaactcctgtatatattcaaacaaccatttatgagaccagtacaaactactcaagaggaagatggctgtagctgccgatttccagaagaagaagaaggaggatgtgaactgagagtgaagttcagcaggagcgcagacgcccccgcgtacaagcagggccagaaccagctctataacgagctcaatctaggacgaagagaggagtacgatgttttggacaagaggcgtggccgggaccctgagatggggggaaagccgagaaggaagaaccctcaggaaggcctgtacaatgaactgcagaaagataagatggcggaggcctacagtgagattgggatgaaaggcgagcgccggaggggcaaggggcacgatggcctttaccagggtctcagtacagccaccaaggacacctacgacgcccttcacatgcaggccctgccccctcgctaatctagaggcgcgcccctctccctcccccccccctaacgttactggccgaagccgcttggaataaggccggtgtgcgtttgtctatatgttattttccaccatattgccgtcttttggcaatgtgagggcccggaaacctggccctgtcttcttgacgagcattcctaggggtctttcccctctcgccaaaggaatgcaaggtctgttgaatgtcgtgaaggaagcagttcctctggaagcttcttgaagacaaacaacgtctgtagcgaccctttgcaggcagcggaaccccccacctggcgacaggtgcctctgcggccaaaagccacgtgtataagatacacctgcaaaggcggcacaaccccagtgccacgttgtgagttggatagttgtggaaagagtcaaatggctctcctcaagcgtattcaacaaggggctgaaggatgcccagaaggtaccccattgtatgggatctgatctggggcctcggtacacatgctttacatgtgtttagtcgaggttaaaaaaacgtctaggccccccgaaccacggggacgtggttttcctttgaaaaacacgatgataatatggccacaacccatatgatggccttaccagtgaccgccttgctcctgccgctggccttgctgctccacgccgccaggccggatatccagatgacccagagcccaagctccctgtccgcctctgtgggcgacagggtgaccatcacatgccgcgccagccagacaatctggtcctacctgaactggtatcagcagagacccggcaaggcccctaatctgctgatctacgcagcatctagcctgcagtctggagtgccctcccggttctctggaagaggatccggaaccgacttcaccctgacaatctcctctctgcaggccgaggacttcgccacatactattgccagcagagctattccatccctcagacctttggccagggcacaaagctggagatcaagggcggcggcggctctggaggaggaggaagcggaggaggaggatcccaggtgcagctgcagcagagcggaccaggactggtgaagccctcccagaccctgtctctgacatgtgccatcagcggcgattccgtgagctccaacagcgccgcctggaattggatccggcagtctcccagcagaggactggagtggctgggaaggacctactatcgctccaagtggtacaacgattatgccgtgtctgtgaagagccggatcaccatcaaccctgacacatctaagaatcagttcagcctgcagctgaattccgtgaccccagaggacacagccgtgtactattgtgcaagggaggtgaccggcgacctggaggatgcctttgacatctggggccagggcaccatggtgacagtgtctagcaccacgacgccagcgccgcgaccaccaacaccggcgcccaccatcgcgtcgcagcccctgtccctgcgcccagaggcgtgccggccagcggcggggggcgcagtgcacacgagggggctggacttcgcctgtgatatctacatctgggcgcccttggccgggacttgtggggtccttctcctgtcactggttatcaccaaacggggcagaaagaaactcctgtatatattcaaacaaccatttatgagaccagtacaaactactcaagaggaagatggctgtagctgccgatttccagaagaagaagaaggaggatgtgaactgagagtgaagttcagcaggagcgcagacgcccccgcgtacaagcagggccagaaccagctctataacgagctcaatctaggacgaagagaggagtacgatgttttggacaagaggcgtggccgggaccctgagatggggggaaagccgagaaggaagaaccctcaggaaggcctgtacaatgaactgcagaaagataagatggcggaggcctacagtgagattgggatgaaaggcgagcgccggaggggcaaggggcacgatggcctttaccagggtctcagtacagccaccaaggacacctacgacgcccttcacatgcaggccctgccccctcgctaa

SEQ ID NO: 234 - DNA, 3527 bp, Artificial Sequence
  Synthesized
atggccttaccagtgaccgccttgctcctgccgctggccttgctgctccacgccgccaggccggacatcgtgatgacccagtccccctccagcctgacagtgacagccggcgagaaggtgacaatgatctgtaagtccagccagagcctgctgaacagcggcgaccagaagaactacctgacctggtaccagcagaagcctggccagccccccaagctgctgatcttctgggccagcacaagggagagcggcgtgcccgacagattcacaggcagcggcagcggcaccgacttcacactgaccatttcctccgtgcaggccgaggacctcgccgtgtactactgccagaacgactactcctaccccctgacattcggcgccggcaccaaactggagctgaagggtggcggtggctcgggcggtggtgggtcgggtggcggcggatctcaggtgcagctccagcagtccgatgccgagctggtgaagcccggaagcagcgtcaagatcagctgtaaggcctccggctacaccttcacagaccacgccatccactgggtgaagcagaagcccgagcagggcctggagtggatcggccactttagccccggaaacaccgacatcaagtacaacgacaagttcaagggcaaggccaccctgaccgtggacaggagcagcagcaccgcctacatgcagctgaacagcctgacaagcgaggacagcgccgtgtacttctgcaagacctccaccttcttcttcgactactggggccagggaaccaccctgacagtgtccagcaccacgacgccagcgccgcgaccaccaacaccggcgcccaccatcgcgtcgcagcccctgtccctgcgcccagaggcgtgccggccagcggcggggggcgcagtgcacacgagggggctggacttcgcctgtgatatctacatctgggcgcccttggccgggacttgtggggtccttctcctgtcactggttatcaccaaacggggcagaaagaaactcctgtatatattcaaacaaccatttatgagaccagtacaaactactcaagaggaagatggctgtagctgccgatttccagaagaagaagaaggaggatgtgaactgagagtgaagttcagcaggagcgcagacgcccccgcgtacaagcagggccagaaccagctctataacgagctcaatctaggacgaagagaggagtacgatgttttggacaagaggcgtggccgggaccctgagatggggggaaagccgagaaggaagaaccctcaggaaggcctgtacaatgaactgcagaaagataagatggcggaggcctacagtgagattgggatgaaaggcgagcgccggaggggcaaggggcacgatggcctttaccagggtctcagtacagccaccaaggacacctacgacgcccttcacatgcaggccctgccccctcgctaatctagaggcgcgcccctctccctcccccccccctaacgttactggccgaagccgcttggaataaggccggtgtgcgtttgtctatatgttattttccaccatattgccgtcttttggcaatgtgagggcccggaaacctggccctgtcttcttgacgagcattcctaggggtctttcccctctcgccaaaggaatgcaaggtctgttgaatgtcgtgaaggaagcagttcctctggaagcttcttgaagacaaacaacgtctgtagcgaccctttgcaggcagcggaaccccccacctggcgacaggtgcctctgcggccaaaagccacgtgtataagatacacctgcaaaggcggcacaaccccagtgccacgttgtgagttggatagttgtggaaagagtcaaatggctctcctcaagcgtattcaacaaggggctgaaggatgcccagaaggtaccccattgtatgggatctgatctggggcctcggtacacatgctttacatgtgtttagtcgaggttaaaaaaacgtctaggccccccgaaccacggggacgtggttttcctttgaaaaacacgatgataatatggccacaacccatatgatggccttaccagtgaccgccttgctcctgccgctggccttgctgctccacgccgccaggccggatatccagatgacccagagcccaagctccctgtccgcctctgtgggcgacagggtgaccatcacatgccgcgccagccagacaatctggtcctacctgaactggtatcagcagagacccggcaaggcccctaatctgctgatctacgcagcatctagcctgcagtctggagtgccctcccggttctctggaagaggatccggaaccgacttcaccctgacaatctcctctctgcaggccgaggacttcgccacatactattgccagcagagctattccatccctcagacctttggccagggcacaaagctggagatcaagggcggcggcggctctggaggaggaggaagcggaggaggaggatcccaggtgcagctgcagcagagcggaccaggactggtgaagccctcccagaccctgtctctgacatgtgccatcagcggcgattccgtgagctccaacagcgccgcctggaattggatccggcagtctcccagcagaggactggagtggctgggaaggacctactatcgctccaagtggtacaacgattatgccgtgtctgtgaagagccggatcaccatcaaccctgacacatctaagaatcagttcagcctgcagctgaattccgtgaccccagaggacacagccgtgtactattgtgcaagggaggtgaccggcgacctggaggatgcctttgacatctggggccagggcaccatggtgacagtgtctagcaccacgacgccagcgccgcgaccaccaacaccggcgcccaccatcgcgtcgcagcccctgtccctgcgcccagaggcgtgccggccagcggcggggggcgcagtgcacacgagggggctggacttcgcctgtgatatctacatctgggcgcccttggccgggacttgtggggtccttctcctgtcactggttatcaccaaacggggcagaaagaaactcctgtatatattcaaacaaccatttatgagaccagtacaaactactcaagaggaagatggctgtagctgccgatttccagaagaagaagaaggaggatgtgaactgagagtgaagttcagcaggagcgcagacgcccccgcgtacaagcagggccagaaccagctctataacgagctcaatctaggacgaagagaggagtacgatgttttggacaagaggcgtggccgggaccctgagatggggggaaagccgagaaggaagaaccctcaggaaggcctgtacaatgaactgcagaaagataagatggcggaggcctacagtgagattgggatgaaaggcgagcgccggaggggcaaggggcacgatggcctttaccagggtctcagtacagccaccaaggacacctacgacgcccttcacatgcaggccctgccccctcgctaa

SEQ ID NO: 235 - DNA, 3665 bp, Artificial Sequence
  Synthesized
atggccttaccagtgaccgccttgctcctgccgctggccttgctgctccacgccgccaggccggatattgtgatgacccagtccccgtcctccctgaccgtgaccgcgggcgaaaaagtgaccatgatttgcaaatcctcccagtccctgctgaattccggcgatcagaaaaattatctgacctggtatcagcagaaaccgggccagccgccgaaactgctgattttttgggcgtccacccgtgaatccggcgtgccggatcgttttaccggctccggctccggcaccgattttaccctgaccatttcctccgtgcaggcggaagatctggcggtgtattattgccagaatgattattcctatccgctgacctttggcgcgggcaccaaactggaactgaaaggcggcggcggctccggcggcggcggctccggcggcggcggctcccaggtgcagctgcagcagtccgatgcggaactggtgaaaccgggctcctccgtgaaaatttcctgcaaagcgtccggctatacctttaccgatcatgcgattcattgggtgaaacagaaaccggaacagggcctggaatggattggccatttttccccgggcaataccgatattaaatataatgataaatttaaaggcaaagcgaccctgaccgtggatcgttcctcctccaccgcgtatatgcagctgaattccctgacctccgaagattccgcggtgtatttttgcaaaacctccacctttttttttgattattggggccagggcaccaccctgaccgtgtcctccaccacgacgccagcgccgcgaccaccaacaccggcgcccaccatcgcgtcgcagcccctgtccctgcgcccagaggcgtgccggccagcggcggggggcgcagtgcacacgagggggctggacttcgcctgtgatatctacatctgggcgcccttggccgggacttgtggggtccttctcctgtcactggttatcaccctttactgcaaacggggcagaaagaaactcctgtatatattcaaacaaccatttatgagaccagtacaaactactcaagaggaagatggctgtagctgccgatttccagaagaagaagaaggaggatgtgaactgagagtgaagttcagcaggagcgcagacgcccccgcgtacaagcagggccagaaccagctctataacgagctcaatctaggacgaagagaggagtacgatgttttggacaagaggcgtggccgggaccctgagatggggggaaagccgagaaggaagaaccctcaggaaggcctgtacaatgaactgcagaaagataagatggcggaggcctacagtgagattgggatgaaaggcgagcgccggaggggcaaggggcacgatggcctttaccagggtctcagtacagccaccaaggacacctacgacgcccttcacatgcaggccctgccccctcgctaatctagaggcgcgcccctctccctcccccccccctaacgttactggccgaagccgcttggaataaggccggtgtgcgtttgtctatatgttattttccaccatattgccgtcttttggcaatgtgagggcccggaaacctggccctgtcttcttgacgagcattcctaggggtctttcccctctcgccaaaggaatgcaaggtctgttgaatgtcgtgaaggaagcagttcctctggaagcttcttgaagacaaacaacgtctgtagcgaccctttgcaggcagcggaaccccccacctggcgacaggtgcctctgcggccaaaagccacgtgtataagatacacctgcaaaggcggcacaaccccagtgccacgttgtgagttggatagttgtggaaagagtcaaatggctctcctcaagcgtattcaacaaggggctgaaggatgcccagaaggtaccccattgtatgggatctgatctggggcctcggtacacatgctttacatgtgtttagtcgaggttaaaaaaacgtctaggccccccgaaccacggggacgtggttttcctttgaaaaacacgatgataatatggccacaacccatatgatggccttaccagtgaccgccttgctcctgccgctggccttgctgctccacgccgccaggccgatgggctggtcctgcatcatcctgttcctggtggccaccgccaccggcgtgcactccaacatcgtgctgacccagtcccccgcctccctggccgtgtccctgggccagcgggccaccatctcctgccgggcctccgagtccgtggactcctacggcaactccttcatgcactggtaccagcagaagcccggccagccccccaagctgctgatctacctggcctccaacctggagtccggcgtgcccgcccggttctccggctccggctcccggaccgacttcaccctgaccatcgaccccgtggaggccgacgacgtggccacctactactgccagcagaacaacggcgacccctacaccttcggcggcggcaccaagctggagatcatccggggcggcggcggctccggcggcggcggctccggcggcggcggctccatgggctggtcctgcatcatcctgttcctggtggccaccgccaccggcgtgcactccgaggtgcagctggtggagtccggcggcggcctgatgcagcccaagggctccctgaagctgtcctgcgccgcctccggcttcaccttcaagacctacgccctgaactgggtgcggcaggcccccggcaccggcctggagtgggtggcccggatccggtccaagtccaacaactacaccacctactacgccgactccgtgaaggaccggttcaccatctcccgggacgactcccagaacatgctgtacctgcagatgaacaacctgaagaccgaggacaccgccatgtactactgcgtgcggccccagtccggcacctccttcgcctactggggccagggcaccctggtgaccgtgtccgccgccaccacgacgccagcgccgcgaccaccaacaccggcgcccaccatcgcgtcgcagcccctgtccctgcgcccagaggcgtgccggccagcggcggggggcgcagtgcacacgagggggctggacttcgcctgtgatatctacatctgggcgcccttggccgggacttgtggggtccttctcctgtcactggttatcaccctttactgcaaacggggcagaaagaaactcctgtatatattcaaacaaccatttatgagaccagtacaaactactcaagaggaagatggctgtagctgccgatttccagaagaagaagaaggaggatgtgaactgagagtgaagttcagcaggagcgcagacgcccccgcgtacaagcagggccagaaccagctctataacgagctcaatctaggacgaagagaggagtacgatgttttggacaagaggcgtggccgggaccctgagatggggggaaagccgagaaggaagaaccctcaggaaggcctgtacaatgaactgcagaaagataagatggcggaggcctacagtgagattgggatgaaaggcgagcgccggaggggcaaggggcacgatggcctttaccagggtctcagtacagccaccaaggacacctacgacgcccttcacatgcaggccctgccccctcgctaa

SEQ ID NO: 236 - protein, 530 aa, Artificial Sequence
  Synthesized
MALPVTALLLPLALLLHAARPMGWSCIILFLVATATGVHSNIVLTQSPASLAVSLGQRATISCRASESVDSYGNSFMHWYQQKPGQPPKLLIYLASNLESGVPARFSGSGSRTDFTLTIDPVEADDVATYYCQQNNGDPYTFGGGTKLEIIRGGGGSGGGGSGGGGSMGWSCIILFLVATATGVHSEVQLVESGGGLMQPKGSLKLSCAASGFTFKTYALNWVRQAPGTGLEWVARIRSKSNNYTTYYADSVKDRFTISRDDSQNMLYLQMNNLKTEDTAMYYCVRPQSGTSFAYWGQGTLVTVSAATTTPAPRPPTPAPTIASQPLSLRPEACRPAAGGAVHTRGLDFACDIYIWAPLAGTCGVLLLSLVITLYCKRGRKKLLYIFKQPFMRPVQTTQEEDGCSCRFPEEEEGGCELRVKFSRSADAPAYQQGQNQLYNELNLGRREEYDVLDKRRGRDPEMGGKPRRKNPQEGLYNELQKDKMAEAYSEIGMKGERRRGKGHDGLYQGLSTATKDTYDALHMQALPPR

SEQ ID NO: 237 - DNA, 3656 bp, Artificial Sequence
  Synthesized
atggccttaccagtgaccgccttgctcctgccgctggccttgctgctccacgccgccaggccggatattgtgatgacccagtccccgtcctccctgaccgtgaccgcgggcgaaaaagtgaccatgatttgcaaatcctcccagtccctgctgaattccggcgatcagaaaaattatctgacctggtatcagcagaaaccgggccagccgccgaaactgctgattttttgggcgtccacccgtgaatccggcgtgccggatcgttttaccggctccggctccggcaccgattttaccctgaccatttcctccgtgcaggcggaagatctggcggtgtattattgccagaatgattattcctatccgctgacctttggcgcgggcaccaaactggaactgaaaggcggcggcggctccggcggcggcggctccggcggcggcggctcccaggtgcagctgcagcagtccgatgcggaactggtgaaaccgggctcctccgtgaaaatttcctgcaaagcgtccggctatacctttaccgatcatgcgattcattgggtgaaacagaaaccggaacagggcctggaatggattggccatttttccccgggcaataccgatattaaatataatgataaatttaaaggcaaagcgaccctgaccgtggatcgttcctcctccaccgcgtatatgcagctgaattccctgacctccgaagattccgcggtgtatttttgcaaaacctccacctttttttttgattattggggccagggcaccaccctgaccgtgtcctccaccacgacgccagcgccgcgaccaccaacaccggcgcccaccatcgcgtcgcagcccctgtccctgcgcccagaggcgtgccggccagcggcggggggcgcagtgcacacgagggggctggacttcgcctgtgatatctacatctgggcgcccttggccgggacttgtggggtccttctcctgtcactggttatcaccaaacggggcagaaagaaactcctgtatatattcaaacaaccatttatgagaccagtacaaactactcaagaggaagatggctgtagctgccgatttccagaagaagaagaaggaggatgtgaactgagagtgaagttcagcaggagcgcagacgcccccgcgtacaagcagggccagaaccagctctataacgagctcaatctaggacgaagagaggagtacgatgttttggacaagaggcgtggccgggaccctgagatggggggaaagccgagaaggaagaaccctcaggaaggcctgtacaatgaactgcagaaagataagatggcggaggcctacagtgagattgggatgaaaggcgagcgccggaggggcaaggggcacgatggcctttaccagggtctcagtacagccaccaaggacacctacgacgcccttcacatgcaggccctgccccctcgctaatctagaggcgcgcccctctccctcccccccccctaacgttactggccgaagccgcttggaataaggccggtgtgcgtttgtctatatgttattttccaccatattgccgtcttttggcaatgtgagggcccggaaacctggccctgtcttcttgacgagcattcctaggggtctttcccctctcgccaaaggaatgcaaggtctgttgaatgtcgtgaaggaagcagttcctctggaagcttcttgaagacaaacaacgtctgtagcgaccctttgcaggcagcggaaccccccacctggcgacaggtgcctctgcggccaaaagccacgtgtataagatacacctgcaaaggcggcacaaccccagtgccacgttgtgagttggatagttgtggaaagagtcaaatggctctcctcaagcgtattcaacaaggggctgaaggatgcccagaaggtaccccattgtatgggatctgatctggggcctcggtacacatgctttacatgtgtttagtcgaggttaaaaaaacgtctaggccccccgaaccacggggacgtggttttcctttgaaaaacacgatgataatatggccacaacccatatgatggccttaccagtgaccgccttgctcctgccgctggccttgctgctccacgccgccaggccgatgggctggtcctgcatcatcctgttcctggtggccaccgccaccggcgtgcactccaacatcgtgctgacccagtcccccgcctccctggccgtgtccctgggccagcgggccaccatctcctgccgggcctccgagtccgtggactcctacggcaactccttcatgcactggtaccagcagaagcccggccagccccccaagctgctgatctacctggcctccaacctggagtccggcgtgcccgcccggttctccggctccggctcccggaccgacttcaccctgaccatcgaccccgtggaggccgacgacgtggccacctactactgccagcagaacaacggcgacccctacaccttcggcggcggcaccaagctggagatcatccggggcggcggcggctccggcggcggcggctccggcggcggcggctccatgggctggtcctgcatcatcctgttcctggtggccaccgccaccggcgtgcactccgaggtgcagctggtggagtccggcggcggcctgatgcagcccaagggctccctgaagctgtcctgcgccgcctccggcttcaccttcaagacctacgccctgaactgggtgcggcaggcccccggcaccggcctggagtgggtggcccggatccggtccaagtccaacaactacaccacctactacgccgactccgtgaaggaccggttcaccatctcccgggacgactcccagaacatgctgtacctgcagatgaacaacctgaagaccgaggacaccgccatgtactactgcgtgcggccccagtccggcacctccttcgcctactggggccagggcaccctggtgaccgtgtccgccgccaccacgacgccagcgccgcgaccaccaacaccggcgcccaccatcgcgtcgcagcccctgtccctgcgcccagaggcgtgccggccagcggcggggggcgcagtgcacacgagggggctggacttcgcctgtgatatctacatctgggcgcccttggccgggacttgtggggtccttctcctgtcactggttatcaccctttactgcaaacggggcagaaagaaactcctgtatatattcaaacaaccatttatgagaccagtacaaactactcaagaggaagatggctgtagctgccgatttccagaagaagaagaaggaggatgtgaactgagagtgaagttcagcaggagcgcagacgcccccgcgtacaagcagggccagaaccagctctataacgagctcaatctaggacgaagagaggagtacgatgttttggacaagaggcgtggccgggaccctgagatggggggaaagccgagaaggaagaaccctcaggaaggcctgtacaatgaactgcagaaagataagatggcggaggcctacagtgagattgggatgaaaggcgagcgccggaggggcaaggggcacgatggcctttaccagggtctcagtacagccaccaaggacacctacgacgcccttcacatgcaggccctgccccctcgctaa

SEQ ID NO: 238 - DNA, 3656 bp, Artificial Sequence
  Synthesized
atggccttaccagtgaccgccttgctcctgccgctggccttgctgctccacgccgccaggccggatattgtgatgacccagtccccgtcctccctgaccgtgaccgcgggcgaaaaagtgaccatgatttgcaaatcctcccagtccctgctgaattccggcgatcagaaaaattatctgacctggtatcagcagaaaccgggccagccgccgaaactgctgattttttgggcgtccacccgtgaatccggcgtgccggatcgttttaccggctccggctccggcaccgattttaccctgaccatttcctccgtgcaggcggaagatctggcggtgtattattgccagaatgattattcctatccgctgacctttggcgcgggcaccaaactggaactgaaaggcggcggcggctccggcggcggcggctccggcggcggcggctcccaggtgcagctgcagcagtccgatgcggaactggtgaaaccgggctcctccgtgaaaatttcctgcaaagcgtccggctatacctttaccgatcatgcgattcattgggtgaaacagaaaccggaacagggcctggaatggattggccatttttccccgggcaataccgatattaaatataatgataaatttaaaggcaaagcgaccctgaccgtggatcgttcctcctccaccgcgtatatgcagctgaattccctgacctccgaagattccgcggtgtatttttgcaaaacctccacctttttttttgattattggggccagggcaccaccctgaccgtgtcctccaccacgacgccagcgccgcgaccaccaacaccggcgcccaccatcgcgtcgcagcccctgtccctgcgcccagaggcgtgccggccagcggcggggggcgcagtgcacacgagggggctggacttcgcctgtgatatctacatctgggcgcccttggccgggacttgtggggtccttctcctgtcactggttatcaccctttactgcaaacggggcagaaagaaactcctgtatatattcaaacaaccatttatgagaccagtacaaactactcaagaggaagatggctgtagctgccgatttccagaagaagaagaaggaggatgtgaactgagagtgaagttcagcaggagcgcagacgcccccgcgtacaagcagggccagaaccagctctataacgagctcaatctaggacgaagagaggagtacgatgttttggacaagaggcgtggccgggaccctgagatggggggaaagccgagaaggaagaaccctcaggaaggcctgtacaatgaactgcagaaagataagatggcggaggcctacagtgagattgggatgaaaggcgagcgccggaggggcaaggggcacgatggcctttaccagggtctcagtacagccaccaaggacacctacgacgcccttcacatgcaggccctgccccctcgctaatctagaggcgcgcccctctccctcccccccccctaacgttactggccgaagccgcttggaataaggccggtgtgcgtttgtctatatgttattttccaccatattgccgtcttttggcaatgtgagggcccggaaacctggccctgtcttcttgacgagcattcctaggggtctttcccctctcgccaaaggaatgcaaggtctgttgaatgtcgtgaaggaagcagttcctctggaagcttcttgaagacaaacaacgtctgtagcgaccctttgcaggcagcggaaccccccacctggcgacaggtgcctctgcggccaaaagccacgtgtataagatacacctgcaaaggcggcacaaccccagtgccacgttgtgagttggatagttgtggaaagagtcaaatggctctcctcaagcgtattcaacaaggggctgaaggatgcccagaaggtaccccattgtatgggatctgatctggggcctcggtacacatgctttacatgtgtttagtcgaggttaaaaaaacgtctaggccccccgaaccacggggacgtggttttcctttgaaaaacacgatgataatatggccacaacccatatgatggccttaccagtgaccgccttgctcctgccgctggccttgctgctccacgccgccaggccgatgggctggtcctgcatcatcctgttcctggtggccaccgccaccggcgtgcactccaacatcgtgctgacccagtcccccgcctccctggccgtgtccctgggccagcgggccaccatctcctgccgggcctccgagtccgtggactcctacggcaactccttcatgcactggtaccagcagaagcccggccagccccccaagctgctgatctacctggcctccaacctggagtccggcgtgcccgcccggttctccggctccggctcccggaccgacttcaccctgaccatcgaccccgtggaggccgacgacgtggccacctactactgccagcagaacaacggcgacccctacaccttcggcggcggcaccaagctggagatcatccggggcggcggcggctccggcggcggcggctccggcggcggcggctccatgggctggtcctgcatcatcctgttcctggtggccaccgccaccggcgtgcactccgaggtgcagctggtggagtccggcggcggcctgatgcagcccaagggctccctgaagctgtcctgcgccgcctccggcttcaccttcaagacctacgccctgaactgggtgcggcaggcccccggcaccggcctggagtgggtggcccggatccggtccaagtccaacaactacaccacctactacgccgactccgtgaaggaccggttcaccatctcccgggacgactcccagaacatgctgtacctgcagatgaacaacctgaagaccgaggacaccgccatgtactactgcgtgcggccccagtccggcacctccttcgcctactggggccagggcaccctggtgaccgtgtccgccgccaccacgacgccagcgccgcgaccaccaacaccggcgcccaccatcgcgtcgcagcccctgtccctgcgcccagaggcgtgccggccagcggcggggggcgcagtgcacacgagggggctggacttcgcctgtgatatctacatctgggcgcccttggccgggacttgtggggtccttctcctgtcactggttatcaccaaacggggcagaaagaaactcctgtatatattcaaacaaccatttatgagaccagtacaaactactcaagaggaagatggctgtagctgccgatttccagaagaagaagaaggaggatgtgaactgagagtgaagttcagcaggagcgcagacgcccccgcgtacaagcagggccagaaccagctctataacgagctcaatctaggacgaagagaggagtacgatgttttggacaagaggcgtggccgggaccctgagatggggggaaagccgagaaggaagaaccctcaggaaggcctgtacaatgaactgcagaaagataagatggcggaggcctacagtgagattgggatgaaaggcgagcgccggaggggcaaggggcacgatggcctttaccagggtctcagtacagccaccaaggacacctacgacgcccttcacatgcaggccctgccccctcgctaa

SEQ ID NO: 239 - protein, 527 aa, Artificial Sequence
  Synthesized
MALPVTALLLPLALLLHAARPMGWSCIILFLVATATGVHSNIVLTQSPASLAVSLGQRATISCRASESVDSYGNSFMHWYQQKPGQPPKLLIYLASNLESGVPARFSGSGSRTDFTLTIDPVEADDVATYYCQQNNGDPYTFGGGTKLEIIRGGGGSGGGGSGGGGSMGWSCIILFLVATATGVHSEVQLVESGGGLMQPKGSLKLSCAASGFTFKTYALNWVRQAPGTGLEWVARIRSKSNNYTTYYADSVKDRFTISRDDSQNMLYLQMNNLKTEDTAMYYCVRPQSGTSFAYWGQGTLVTVSAATTTPAPRPPTPAPTIASQPLSLRPEACRPAAGGAVHTRGLDFACDIYIWAPLAGTCGVLLLSLVITKRGRKKLLYIFKQPFMRPVQTTQEEDGCSCRFPEEEEGGCELRVKFSRSADAPAYQQGQNQLYNELNLGRREEYDVLDKRRGRDPEMGGKPRRKNPQEGLYNELQKDKMAEAYSEIGMKGERRRGKGHDGLYQGLSTATKDTYDALHMQALPPR

SEQ ID NO: 240 - DNA, 3665 bp, Artificial Sequence
  Synthesized
atggccttaccagtgaccgccttgctcctgccgctggccttgctgctccacgccgccaggccggacatcgtgatgacccagtccccctccagcctgacagtgacagccggcgagaaggtgacaatgatctgtaagtccagccagagcctgctgaacagcggcgaccagaagaactacctgacctggtaccagcagaagcctggccagccccccaagctgctgatcttctgggccagcacaagggagagcggcgtgcccgacagattcacaggcagcggcagcggcaccgacttcacactgaccatttcctccgtgcaggccgaggacctcgccgtgtactactgccagaacgactactcctaccccctgacattcggcgccggcaccaaactggagctgaagggtggcggtggctcgggcggtggtgggtcgggtggcggcggatctcaggtgcagctccagcagtccgatgccgagctggtgaagcccggaagcagcgtcaagatcagctgtaaggcctccggctacaccttcacagaccacgccatccactgggtgaagcagaagcccgagcagggcctggagtggatcggccactttagccccggaaacaccgacatcaagtacaacgacaagttcaagggcaaggccaccctgaccgtggacaggagcagcagcaccgcctacatgcagctgaacagcctgacaagcgaggacagcgccgtgtacttctgcaagacctccaccttcttcttcgactactggggccagggaaccaccctgacagtgtccagcaccacgacgccagcgccgcgaccaccaacaccggcgcccaccatcgcgtcgcagcccctgtccctgcgcccagaggcgtgccggccagcggcggggggcgcagtgcacacgagggggctggacttcgcctgtgatatctacatctgggcgcccttggccgggacttgtggggtccttctcctgtcactggttatcaccctttactgcaaacggggcagaaagaaactcctgtatatattcaaacaaccatttatgagaccagtacaaactactcaagaggaagatggctgtagctgccgatttccagaagaagaagaaggaggatgtgaactgagagtgaagttcagcaggagcgcagacgcccccgcgtacaagcagggccagaaccagctctataacgagctcaatctaggacgaagagaggagtacgatgttttggacaagaggcgtggccgggaccctgagatggggggaaagccgagaaggaagaaccctcaggaaggcctgtacaatgaactgcagaaagataagatggcggaggcctacagtgagattgggatgaaaggcgagcgccggaggggcaaggggcacgatggcctttaccagggtctcagtacagccaccaaggacacctacgacgcccttcacatgcaggccctgccccctcgctaatctagaggcgcgcccctctccctcccccccccctaacgttactggccgaagccgcttggaataaggccggtgtgcgtttgtctatatgttattttccaccatattgccgtcttttggcaatgtgagggcccggaaacctggccctgtcttcttgacgagcattcctaggggtctttcccctctcgccaaaggaatgcaaggtctgttgaatgtcgtgaaggaagcagttcctctggaagcttcttgaagacaaacaacgtctgtagcgaccctttgcaggcagcggaaccccccacctggcgacaggtgcctctgcggccaaaagccacgtgtataagatacacctgcaaaggcggcacaaccccagtgccacgttgtgagttggatagttgtggaaagagtcaaatggctctcctcaagcgtattcaacaaggggctgaaggatgcccagaaggtaccccattgtatgggatctgatctggggcctcggtacacatgctttacatgtgtttagtcgaggttaaaaaaacgtctaggccccccgaaccacggggacgtggttttcctttgaaaaacacgatgataatatggccacaacccatatgatggccttaccagtgaccgccttgctcctgccgctggccttgctgctccacgccgccaggccgatgggctggtcctgcatcatcctgttcctggtggccaccgccaccggcgtgcactccaacatcgtgctgacccagtcccccgcctccctggccgtgtccctgggccagcgggccaccatctcctgccgggcctccgagtccgtggactcctacggcaactccttcatgcactggtaccagcagaagcccggccagccccccaagctgctgatctacctggcctccaacctggagtccggcgtgcccgcccggttctccggctccggctcccggaccgacttcaccctgaccatcgaccccgtggaggccgacgacgtggccacctactactgccagcagaacaacggcgacccctacaccttcggcggcggcaccaagctggagatcatccggggcggcggcggctccggcggcggcggctccggcggcggcggctccatgggctggtcctgcatcatcctgttcctggtggccaccgccaccggcgtgcactccgaggtgcagctggtggagtccggcggcggcctgatgcagcccaagggctccctgaagctgtcctgcgccgcctccggcttcaccttcaagacctacgccctgaactgggtgcggcaggcccccggcaccggcctggagtgggtggcccggatccggtccaagtccaacaactacaccacctactacgccgactccgtgaaggaccggttcaccatctcccgggacgactcccagaacatgctgtacctgcagatgaacaacctgaagaccgaggacaccgccatgtactactgcgtgcggccccagtccggcacctccttcgcctactggggccagggcaccctggtgaccgtgtccgccgccaccacgacgccagcgccgcgaccaccaacaccggcgcccaccatcgcgtcgcagcccctgtccctgcgcccagaggcgtgccggccagcggcggggggcgcagtgcacacgagggggctggacttcgcctgtgatatctacatctgggcgcccttggccgggacttgtggggtccttctcctgtcactggttatcaccctttactgcaaacggggcagaaagaaactcctgtatatattcaaacaaccatttatgagaccagtacaaactactcaagaggaagatggctgtagctgccgatttccagaagaagaagaaggaggatgtgaactgagagtgaagttcagcaggagcgcagacgcccccgcgtacaagcagggccagaaccagctctataacgagctcaatctaggacgaagagaggagtacgatgttttggacaagaggcgtggccgggaccctgagatggggggaaagccgagaaggaagaaccctcaggaaggcctgtacaatgaactgcagaaagataagatggcggaggcctacagtgagattgggatgaaaggcgagcgccggaggggcaaggggcacgatggcctttaccagggtctcagtacagccaccaaggacacctacgacgcccttcacatgcaggccctgccccctcgctaa

SEQ ID NO: 241 - DNA, 3656 bp, Artificial Sequence
  Synthesized
atggccttaccagtgaccgccttgctcctgccgctggccttgctgctccacgccgccaggccggacatcgtgatgacccagtccccctccagcctgacagtgacagccggcgagaaggtgacaatgatctgtaagtccagccagagcctgctgaacagcggcgaccagaagaactacctgacctggtaccagcagaagcctggccagccccccaagctgctgatcttctgggccagcacaagggagagcggcgtgcccgacagattcacaggcagcggcagcggcaccgacttcacactgaccatttcctccgtgcaggccgaggacctcgccgtgtactactgccagaacgactactcctaccccctgacattcggcgccggcaccaaactggagctgaagggtggcggtggctcgggcggtggtgggtcgggtggcggcggatctcaggtgcagctccagcagtccgatgccgagctggtgaagcccggaagcagcgtcaagatcagctgtaaggcctccggctacaccttcacagaccacgccatccactgggtgaagcagaagcccgagcagggcctggagtggatcggccactttagccccggaaacaccgacatcaagtacaacgacaagttcaagggcaaggccaccctgaccgtggacaggagcagcagcaccgcctacatgcagctgaacagcctgacaagcgaggacagcgccgtgtacttctgcaagacctccaccttcttcttcgactactggggccagggaaccaccctgacagtgtccagcaccacgacgccagcgccgcgaccaccaacaccggcgcccaccatcgcgtcgcagcccctgtccctgcgcccagaggcgtgccggccagcggcggggggcgcagtgcacacgagggggctggacttcgcctgtgatatctacatctgggcgcccttggccgggacttgtggggtccttctcctgtcactggttatcaccaaacggggcagaaagaaactcctgtatatattcaaacaaccatttatgagaccagtacaaactactcaagaggaagatggctgtagctgccgatttccagaagaagaagaaggaggatgtgaactgagagtgaagttcagcaggagcgcagacgcccccgcgtacaagcagggccagaaccagctctataacgagctcaatctaggacgaagagaggagtacgatgttttggacaagaggcgtggccgggaccctgagatggggggaaagccgagaaggaagaaccctcaggaaggcctgtacaatgaactgcagaaagataagatggcggaggcctacagtgagattgggatgaaaggcgagcgccggaggggcaaggggcacgatggcctttaccagggtctcagtacagccaccaaggacacctacgacgcccttcacatgcaggccctgccccctcgctaatctagaggcgcgcccctctccctcccccccccctaacgttactggccgaagccgcttggaataaggccggtgtgcgtttgtctatatgttattttccaccatattgccgtcttttggcaatgtgagggcccggaaacctggccctgtcttcttgacgagcattcctaggggtctttcccctctcgccaaaggaatgcaaggtctgttgaatgtcgtgaaggaagcagttcctctggaagcttcttgaagacaaacaacgtctgtagcgaccctttgcaggcagcggaaccccccacctggcgacaggtgcctctgcggccaaaagccacgtgtataagatacacctgcaaaggcggcacaaccccagtgccacgttgtgagttggatagttgtggaaagagtcaaatggctctcctcaagcgtattcaacaaggggctgaaggatgcccagaaggtaccccattgtatgggatctgatctggggcctcggtacacatgctttacatgtgtttagtcgaggttaaaaaaacgtctaggccccccgaaccacggggacgtggttttcctttgaaaaacacgatgataatatggccacaacccatatgatggccttaccagtgaccgccttgctcctgccgctggccttgctgctccacgccgccaggccgatgggctggtcctgcatcatcctgttcctggtggccaccgccaccggcgtgcactccaacatcgtgctgacccagtcccccgcctccctggccgtgtccctgggccagcgggccaccatctcctgccgggcctccgagtccgtggactcctacggcaactccttcatgcactggtaccagcagaagcccggccagccccccaagctgctgatctacctggcctccaacctggagtccggcgtgcccgcccggttctccggctccggctcccggaccgacttcaccctgaccatcgaccccgtggaggccgacgacgtggccacctactactgccagcagaacaacggcgacccctacaccttcggcggcggcaccaagctggagatcatccggggcggcggcggctccggcggcggcggctccggcggcggcggctccatgggctggtcctgcatcatcctgttcctggtggccaccgccaccggcgtgcactccgaggtgcagctggtggagtccggcggcggcctgatgcagcccaagggctccctgaagctgtcctgcgccgcctccggcttcaccttcaagacctacgccctgaactgggtgcggcaggcccccggcaccggcctggagtgggtggcccggatccggtccaagtccaacaactacaccacctactacgccgactccgtgaaggaccggttcaccatctcccgggacgactcccagaacatgctgtacctgcagatgaacaacctgaagaccgaggacaccgccatgtactactgcgtgcggccccagtccggcacctccttcgcctactggggccagggcaccctggtgaccgtgtccgccgccaccacgacgccagcgccgcgaccaccaacaccggcgcccaccatcgcgtcgcagcccctgtccctgcgcccagaggcgtgccggccagcggcggggggcgcagtgcacacgagggggctggacttcgcctgtgatatctacatctgggcgcccttggccgggacttgtggggtccttctcctgtcactggttatcaccctttactgcaaacggggcagaaagaaactcctgtatatattcaaacaaccatttatgagaccagtacaaactactcaagaggaagatggctgtagctgccgatttccagaagaagaagaaggaggatgtgaactgagagtgaagttcagcaggagcgcagacgcccccgcgtacaagcagggccagaaccagctctataacgagctcaatctaggacgaagagaggagtacgatgttttggacaagaggcgtggccgggaccctgagatggggggaaagccgagaaggaagaaccctcaggaaggcctgtacaatgaactgcagaaagataagatggcggaggcctacagtgagattgggatgaaaggcgagcgccggaggggcaaggggcacgatggcctttaccagggtctcagtacagccaccaaggacacctacgacgcccttcacatgcaggccctgccccctcgctaa

SEQ ID NO: 242 - DNA, 3656 bp, Artificial Sequence
  Synthesized
atggccttaccagtgaccgccttgctcctgccgctggccttgctgctccacgccgccaggccggacatcgtgatgacccagtccccctccagcctgacagtgacagccggcgagaaggtgacaatgatctgtaagtccagccagagcctgctgaacagcggcgaccagaagaactacctgacctggtaccagcagaagcctggccagccccccaagctgctgatcttctgggccagcacaagggagagcggcgtgcccgacagattcacaggcagcggcagcggcaccgacttcacactgaccatttcctccgtgcaggccgaggacctcgccgtgtactactgccagaacgactactcctaccccctgacattcggcgccggcaccaaactggagctgaagggtggcggtggctcgggcggtggtgggtcgggtggcggcggatctcaggtgcagctccagcagtccgatgccgagctggtgaagcccggaagcagcgtcaagatcagctgtaaggcctccggctacaccttcacagaccacgccatccactgggtgaagcagaagcccgagcagggcctggagtggatcggccactttagccccggaaacaccgacatcaagtacaacgacaagttcaagggcaaggccaccctgaccgtggacaggagcagcagcaccgcctacatgcagctgaacagcctgacaagcgaggacagcgccgtgtacttctgcaagacctccaccttcttcttcgactactggggccagggaaccaccctgacagtgtccagcaccacgacgccagcgccgcgaccaccaacaccggcgcccaccatcgcgtcgcagcccctgtccctgcgcccagaggcgtgccggccagcggcggggggcgcagtgcacacgagggggctggacttcgcctgtgatatctacatctgggcgcccttggccgggacttgtggggtccttctcctgtcactggttatcaccctttactgcaaacggggcagaaagaaactcctgtatatattcaaacaaccatttatgagaccagtacaaactactcaagaggaagatggctgtagctgccgatttccagaagaagaagaaggaggatgtgaactgagagtgaagttcagcaggagcgcagacgcccccgcgtacaagcagggccagaaccagctctataacgagctcaatctaggacgaagagaggagtacgatgttttggacaagaggcgtggccgggaccctgagatggggggaaagccgagaaggaagaaccctcaggaaggcctgtacaatgaactgcagaaagataagatggcggaggcctacagtgagattgggatgaaaggcgagcgccggaggggcaaggggcacgatggcctttaccagggtctcagtacagccaccaaggacacctacgacgcccttcacatgcaggccctgccccctcgctaatctagaggcgcgcccctctccctcccccccccctaacgttactggccgaagccgcttggaataaggccggtgtgcgtttgtctatatgttattttccaccatattgccgtcttttggcaatgtgagggcccggaaacctggccctgtcttcttgacgagcattcctaggggtctttcccctctcgccaaaggaatgcaaggtctgttgaatgtcgtgaaggaagcagttcctctggaagcttcttgaagacaaacaacgtctgtagcgaccctttgcaggcagcggaaccccccacctggcgacaggtgcctctgcggccaaaagccacgtgtataagatacacctgcaaaggcggcacaaccccagtgccacgttgtgagttggatagttgtggaaagagtcaaatggctctcctcaagcgtattcaacaaggggctgaaggatgcccagaaggtaccccattgtatgggatctgatctggggcctcggtacacatgctttacatgtgtttagtcgaggttaaaaaaacgtctaggccccccgaaccacggggacgtggttttcctttgaaaaacacgatgataatatggccacaacccatatgatggccttaccagtgaccgccttgctcctgccgctggccttgctgctccacgccgccaggccgatgggctggtcctgcatcatcctgttcctggtggccaccgccaccggcgtgcactccaacatcgtgctgacccagtcccccgcctccctggccgtgtccctgggccagcgggccaccatctcctgccgggcctccgagtccgtggactcctacggcaactccttcatgcactggtaccagcagaagcccggccagccccccaagctgctgatctacctggcctccaacctggagtccggcgtgcccgcccggttctccggctccggctcccggaccgacttcaccctgaccatcgaccccgtggaggccgacgacgtggccacctactactgccagcagaacaacggcgacccctacaccttcggcggcggcaccaagctggagatcatccggggcggcggcggctccggcggcggcggctccggcggcggcggctccatgggctggtcctgcatcatcctgttcctggtggccaccgccaccggcgtgcactccgaggtgcagctggtggagtccggcggcggcctgatgcagcccaagggctccctgaagctgtcctgcgccgcctccggcttcaccttcaagacctacgccctgaactgggtgcggcaggcccccggcaccggcctggagtgggtggcccggatccggtccaagtccaacaactacaccacctactacgccgactccgtgaaggaccggttcaccatctcccgggacgactcccagaacatgctgtacctgcagatgaacaacctgaagaccgaggacaccgccatgtactactgcgtgcggccccagtccggcacctccttcgcctactggggccagggcaccctggtgaccgtgtccgccgccaccacgacgccagcgccgcgaccaccaacaccggcgcccaccatcgcgtcgcagcccctgtccctgcgcccagaggcgtgccggccagcggcggggggcgcagtgcacacgagggggctggacttcgcctgtgatatctacatctgggcgcccttggccgggacttgtggggtccttctcctgtcactggttatcaccaaacggggcagaaagaaactcctgtatatattcaaacaaccatttatgagaccagtacaaactactcaagaggaagatggctgtagctgccgatttccagaagaagaagaaggaggatgtgaactgagagtgaagttcagcaggagcgcagacgcccccgcgtacaagcagggccagaaccagctctataacgagctcaatctaggacgaagagaggagtacgatgttttggacaagaggcgtggccgggaccctgagatggggggaaagccgagaaggaagaaccctcaggaaggcctgtacaatgaactgcagaaagataagatggcggaggcctacagtgagattgggatgaaaggcgagcgccggaggggcaaggggcacgatggcctttaccagggtctcagtacagccaccaaggacacctacgacgcccttcacatgcaggccctgccccctcgctaa

SEQ ID NO: 243 - DNA, 3647 bp, Artificial Sequence
  Synthesized
atggccttaccagtgaccgccttgctcctgccgctggccttgctgctccacgccgccaggccggacatcgtgatgacccagtccccctccagcctgacagtgacagccggcgagaaggtgacaatgatctgtaagtccagccagagcctgctgaacagcggcgaccagaagaactacctgacctggtaccagcagaagcctggccagccccccaagctgctgatcttctgggccagcacaagggagagcggcgtgcccgacagattcacaggcagcggcagcggcaccgacttcacactgaccatttcctccgtgcaggccgaggacctcgccgtgtactactgccagaacgactactcctaccccctgacattcggcgccggcaccaaactggagctgaagggtggcggtggctcgggcggtggtgggtcgggtggcggcggatctcaggtgcagctccagcagtccgatgccgagctggtgaagcccggaagcagcgtcaagatcagctgtaaggcctccggctacaccttcacagaccacgccatccactgggtgaagcagaagcccgagcagggcctggagtggatcggccactttagccccggaaacaccgacatcaagtacaacgacaagttcaagggcaaggccaccctgaccgtggacaggagcagcagcaccgcctacatgcagctgaacagcctgacaagcgaggacagcgccgtgtacttctgcaagacctccaccttcttcttcgactactggggccagggaaccaccctgacagtgtccagcaccacgacgccagcgccgcgaccaccaacaccggcgcccaccatcgcgtcgcagcccctgtccctgcgcccagaggcgtgccggccagcggcggggggcgcagtgcacacgagggggctggacttcgcctgtgatatctacatctgggcgcccttggccgggacttgtggggtccttctcctgtcactggttatcaccaaacggggcagaaagaaactcctgtatatattcaaacaaccatttatgagaccagtacaaactactcaagaggaagatggctgtagctgccgatttccagaagaagaagaaggaggatgtgaactgagagtgaagttcagcaggagcgcagacgcccccgcgtacaagcagggccagaaccagctctataacgagctcaatctaggacgaagagaggagtacgatgttttggacaagaggcgtggccgggaccctgagatggggggaaagccgagaaggaagaaccctcaggaaggcctgtacaatgaactgcagaaagataagatggcggaggcctacagtgagattgggatgaaaggcgagcgccggaggggcaaggggcacgatggcctttaccagggtctcagtacagccaccaaggacacctacgacgcccttcacatgcaggccctgccccctcgctaatctagaggcgcgcccctctccctcccccccccctaacgttactggccgaagccgcttggaataaggccggtgtgcgtttgtctatatgttattttccaccatattgccgtcttttggcaatgtgagggcccggaaacctggccctgtcttcttgacgagcattcctaggggtctttcccctctcgccaaaggaatgcaaggtctgttgaatgtcgtgaaggaagcagttcctctggaagcttcttgaagacaaacaacgtctgtagcgaccctttgcaggcagcggaaccccccacctggcgacaggtgcctctgcggccaaaagccacgtgtataagatacacctgcaaaggcggcacaaccccagtgccacgttgtgagttggatagttgtggaaagagtcaaatggctctcctcaagcgtattcaacaaggggctgaaggatgcccagaaggtaccccattgtatgggatctgatctggggcctcggtacacatgctttacatgtgtttagtcgaggttaaaaaaacgtctaggccccccgaaccacggggacgtggttttcctttgaaaaacacgatgataatatggccacaacccatatgatggccttaccagtgaccgccttgctcctgccgctggccttgctgctccacgccgccaggccgatgggctggtcctgcatcatcctgttcctggtggccaccgccaccggcgtgcactccaacatcgtgctgacccagtcccccgcctccctggccgtgtccctgggccagcgggccaccatctcctgccgggcctccgagtccgtggactcctacggcaactccttcatgcactggtaccagcagaagcccggccagccccccaagctgctgatctacctggcctccaacctggagtccggcgtgcccgcccggttctccggctccggctcccggaccgacttcaccctgaccatcgaccccgtggaggccgacgacgtggccacctactactgccagcagaacaacggcgacccctacaccttcggcggcggcaccaagctggagatcatccggggcggcggcggctccggcggcggcggctccggcggcggcggctccatgggctggtcctgcatcatcctgttcctggtggccaccgccaccggcgtgcactccgaggtgcagctggtggagtccggcggcggcctgatgcagcccaagggctccctgaagctgtcctgcgccgcctccggcttcaccttcaagacctacgccctgaactgggtgcggcaggcccccggcaccggcctggagtgggtggcccggatccggtccaagtccaacaactacaccacctactacgccgactccgtgaaggaccggttcaccatctcccgggacgactcccagaacatgctgtacctgcagatgaacaacctgaagaccgaggacaccgccatgtactactgcgtgcggccccagtccggcacctccttcgcctactggggccagggcaccctggtgaccgtgtccgccgccaccacgacgccagcgccgcgaccaccaacaccggcgcccaccatcgcgtcgcagcccctgtccctgcgcccagaggcgtgccggccagcggcggggggcgcagtgcacacgagggggctggacttcgcctgtgatatctacatctgggcgcccttggccgggacttgtggggtccttctcctgtcactggttatcaccaaacggggcagaaagaaactcctgtatatattcaaacaaccatttatgagaccagtacaaactactcaagaggaagatggctgtagctgccgatttccagaagaagaagaaggaggatgtgaactgagagtgaagttcagcaggagcgcagacgcccccgcgtacaagcagggccagaaccagctctataacgagctcaatctaggacgaagagaggagtacgatgttttggacaagaggcgtggccgggaccctgagatggggggaaagccgagaaggaagaaccctcaggaaggcctgtacaatgaactgcagaaagataagatggcggaggcctacagtgagattgggatgaaaggcgagcgccggaggggcaaggggcacgatggcctttaccagggtctcagtacagccaccaaggacacctacgacgcccttcacatgcaggccctgccccctcgctaa

SEQ ID NO: 244 - DNA, 3518 bp, Artificial Sequence
  Synthesized
atggccttaccagtgaccgccttgctcctgccgctggccttgctgctccacgccgccaggccggatattgtgatgacccagtccccgtcctccctgaccgtgaccgcgggcgaaaaagtgaccatgatttgcaaatcctcccagtccctgctgaattccggcgatcagaaaaattatctgacctggtatcagcagaaaccgggccagccgccgaaactgctgattttttgggcgtccacccgtgaatccggcgtgccggatcgttttaccggctccggctccggcaccgattttaccctgaccatttcctccgtgcaggcggaagatctggcggtgtattattgccagaatgattattcctatccgctgacctttggcgcgggcaccaaactggaactgaaaggcggcggcggctccggcggcggcggctccggcggcggcggctcccaggtgcagctgcagcagtccgatgcggaactggtgaaaccgggctcctccgtgaaaatttcctgcaaagcgtccggctatacctttaccgatcatgcgattcattgggtgaaacagaaaccggaacagggcctggaatggattggccatttttccccgggcaataccgatattaaatataatgataaatttaaaggcaaagcgaccctgaccgtggatcgttcctcctccaccgcgtatatgcagctgaattccctgacctccgaagattccgcggtgtatttttgcaaaacctccacctttttttttgattattggggccagggcaccaccctgaccgtgtcctccaccacgacgccagcgccgcgaccaccaacaccggcgcccaccatcgcgtcgcagcccctgtccctgcgcccagaggcgtgccggccagcggcggggggcgcagtgcacacgagggggctggacttcgcctgtgatatctacatctgggcgcccttggccgggacttgtggggtccttctcctgtcactggttatcaccctttactgcaaacggggcagaaagaaactcctgtatatattcaaacaaccatttatgagaccagtacaaactactcaagaggaagatggctgtagctgccgatttccagaagaagaagaaggaggatgtgaactgagagtgaagttcagcaggagcgcagacgcccccgcgtacaagcagggccagaaccagctctataacgagctcaatctaggacgaagagaggagtacgatgttttggacaagaggcgtggccgggaccctgagatggggggaaagccgagaaggaagaaccctcaggaaggcctgtacaatgaactgcagaaagataagatggcggaggcctacagtgagattgggatgaaaggcgagcgccggaggggcaaggggcacgatggcctttaccagggtctcagtacagccaccaaggacacctacgacgcccttcacatgcaggccctgccccctcgctaatctagaggcgcgcccctctccctcccccccccctaacgttactggccgaagccgcttggaataaggccggtgtgcgtttgtctatatgttattttccaccatattgccgtcttttggcaatgtgagggcccggaaacctggccctgtcttcttgacgagcattcctaggggtctttcccctctcgccaaaggaatgcaaggtctgttgaatgtcgtgaaggaagcagttcctctggaagcttcttgaagacaaacaacgtctgtagcgaccctttgcaggcagcggaaccccccacctggcgacaggtgcctctgcggccaaaagccacgtgtataagatacacctgcaaaggcggcacaaccccagtgccacgttgtgagttggatagttgtggaaagagtcaaatggctctcctcaagcgtattcaacaaggggctgaaggatgcccagaaggtaccccattgtatgggatctgatctggggcctcggtacacatgctttacatgtgtttagtcgaggttaaaaaaacgtctaggccccccgaaccacggggacgtggttttcctttgaaaaacacgatgataatatggccacaacccatatgatggccttaccagtgaccgccttgctcctgccgctggccttgctgctccacgccgccaggccggacatccagctcacccagtccccgagctcgctgtccgcctccgtgggagatcgggtcaccatcacgtgccgcgccagccagtcgatttcctcctacctgaactggtaccaacagaagcccggaaaagccccgaagcttctcatctacgccgcctcgagcctgcagtcaggagtgccctcacggttctccggctccggttccggtactgatttcaccctgaccatttcctccctgcaaccggaggacttcgctacttactactgccagcagtcgtactccaccccctacactttcggacaaggcaccaaggtcgaaatcaagggtggcggtggctcgggcggtggtgggtcgggtggcggcggatctgaagtgcaattggtggaatcagggggaggacttgtgcagcctggaggatcgctgagactgtcatgtgccgtgtccggctttgccctgtccaaccacgggatgtcctgggtccgccgcgcgcctggaaagggcctcgaatgggtgtcgggtattgtgtacagcggtagcacctactatgccgcatccgtgaaggggagattcaccatcagccgggacaactccaggaacactctgtacctccaaatgaattcgctgaggccagaggacactgccatctactactgctccgcgcatggcggagagtccgacgtctggggacaggggaccaccgtgaccgtgtctagcaccacgacgccagcgccgcgaccaccaacaccggcgcccaccatcgcgtcgcagcccctgtccctgcgcccagaggcgtgccggccagcggcggggggcgcagtgcacacgagggggctggacttcgcctgtgatatctacatctgggcgcccttggccgggacttgtggggtccttctcctgtcactggttatcaccctttactgcaaacggggcagaaagaaactcctgtatatattcaaacaaccatttatgagaccagtacaaactactcaagaggaagatggctgtagctgccgatttccagaagaagaagaaggaggatgtgaactgagagtgaagttcagcaggagcgcagacgcccccgcgtacaagcagggccagaaccagctctataacgagctcaatctaggacgaagagaggagtacgatgttttggacaagaggcgtggccgggaccctgagatggggggaaagccgagaaggaagaaccctcaggaaggcctgtacaatgaactgcagaaagataagatggcggaggcctacagtgagattgggatgaaaggcgagcgccggaggggcaaggggcacgatggcctttaccagggtctcagtacagccaccaaggacacctacgacgcccttcacatgcaggccctgccccctcgctaa

SEQ ID NO: 245 - protein, 482 aa, Artificial Sequence
  Synthesized
MALPVTALLLPLALLLHAARPEIVLTQSPGTLSLSPGERATLSCRGGQSVSSSYLAWYQQKPGQAPRLLMYDASIRATGIPDRFSGSGSGTDFTLTISRLEPEDFAVYYCQQYQSWPLTFGQGTKVEIKGGGGSGGGGSGGGGSEVQLLESGGGLVQPGGSLRLSCAASGFTFSSYAMNWVRQAPGKGLEWVSAILSSGGSTYYADSVKGRFTISRDNSKNTLYLQMNSLRAEDTAVYYCARYWPMDIWGQGTLVTVSSTTTPAPRPPTPAPTIASQPLSLRPEACRPAAGGAVHTRGLDFACDIYIWAPLAGTCGVLLLSLVITLYCKRGRKKLLYIFKQPFMRPVQTTQEEDGCSCRFPEEEEGGCELRVKFSRSADAPAYQQGQNQLYNELNLGRREEYDVLDKRRGRDPEMGGKPRRKNPQEGLYNELQKDKMAEAYSEIGMKGERRRGKGHDGLYQGLSTATKDTYDALHMQALPPR

SEQ ID NO: 246 - DNA, 3509 bp, Artificial Sequence
  Synthesized
atggccttaccagtgaccgccttgctcctgccgctggccttgctgctccacgccgccaggccggatattgtgatgacccagtccccgtcctccctgaccgtgaccgcgggcgaaaaagtgaccatgatttgcaaatcctcccagtccctgctgaattccggcgatcagaaaaattatctgacctggtatcagcagaaaccgggccagccgccgaaactgctgattttttgggcgtccacccgtgaatccggcgtgccggatcgttttaccggctccggctccggcaccgattttaccctgaccatttcctccgtgcaggcggaagatctggcggtgtattattgccagaatgattattcctatccgctgacctttggcgcgggcaccaaactggaactgaaaggcggcggcggctccggcggcggcggctccggcggcggcggctcccaggtgcagctgcagcagtccgatgcggaactggtgaaaccgggctcctccgtgaaaatttcctgcaaagcgtccggctatacctttaccgatcatgcgattcattgggtgaaacagaaaccggaacagggcctggaatggattggccatttttccccgggcaataccgatattaaatataatgataaatttaaaggcaaagcgaccctgaccgtggatcgttcctcctccaccgcgtatatgcagctgaattccctgacctccgaagattccgcggtgtatttttgcaaaacctccacctttttttttgattattggggccagggcaccaccctgaccgtgtcctccaccacgacgccagcgccgcgaccaccaacaccggcgcccaccatcgcgtcgcagcccctgtccctgcgcccagaggcgtgccggccagcggcggggggcgcagtgcacacgagggggctggacttcgcctgtgatatctacatctgggcgcccttggccgggacttgtggggtccttctcctgtcactggttatcaccaaacggggcagaaagaaactcctgtatatattcaaacaaccatttatgagaccagtacaaactactcaagaggaagatggctgtagctgccgatttccagaagaagaagaaggaggatgtgaactgagagtgaagttcagcaggagcgcagacgcccccgcgtacaagcagggccagaaccagctctataacgagctcaatctaggacgaagagaggagtacgatgttttggacaagaggcgtggccgggaccctgagatggggggaaagccgagaaggaagaaccctcaggaaggcctgtacaatgaactgcagaaagataagatggcggaggcctacagtgagattgggatgaaaggcgagcgccggaggggcaaggggcacgatggcctttaccagggtctcagtacagccaccaaggacacctacgacgcccttcacatgcaggccctgccccctcgctaatctagaggcgcgcccctctccctcccccccccctaacgttactggccgaagccgcttggaataaggccggtgtgcgtttgtctatatgttattttccaccatattgccgtcttttggcaatgtgagggcccggaaacctggccctgtcttcttgacgagcattcctaggggtctttcccctctcgccaaaggaatgcaaggtctgttgaatgtcgtgaaggaagcagttcctctggaagcttcttgaagacaaacaacgtctgtagcgaccctttgcaggcagcggaaccccccacctggcgacaggtgcctctgcggccaaaagccacgtgtataagatacacctgcaaaggcggcacaaccccagtgccacgttgtgagttggatagttgtggaaagagtcaaatggctctcctcaagcgtattcaacaaggggctgaaggatgcccagaaggtaccccattgtatgggatctgatctggggcctcggtacacatgctttacatgtgtttagtcgaggttaaaaaaacgtctaggccccccgaaccacggggacgtggttttcctttgaaaaacacgatgataatatggccacaacccatatgatggccttaccagtgaccgccttgctcctgccgctggccttgctgctccacgccgccaggccggacatccagctcacccagtccccgagctcgctgtccgcctccgtgggagatcgggtcaccatcacgtgccgcgccagccagtcgatttcctcctacctgaactggtaccaacagaagcccggaaaagccccgaagcttctcatctacgccgcctcgagcctgcagtcaggagtgccctcacggttctccggctccggttccggtactgatttcaccctgaccatttcctccctgcaaccggaggacttcgctacttactactgccagcagtcgtactccaccccctacactttcggacaaggcaccaaggtcgaaatcaagggtggcggtggctcgggcggtggtgggtcgggtggcggcggatctgaagtgcaattggtggaatcagggggaggacttgtgcagcctggaggatcgctgagactgtcatgtgccgtgtccggctttgccctgtccaaccacgggatgtcctgggtccgccgcgcgcctggaaagggcctcgaatgggtgtcgggtattgtgtacagcggtagcacctactatgccgcatccgtgaaggggagattcaccatcagccgggacaactccaggaacactctgtacctccaaatgaattcgctgaggccagaggacactgccatctactactgctccgcgcatggcggagagtccgacgtctggggacaggggaccaccgtgaccgtgtctagcaccacgacgccagcgccgcgaccaccaacaccggcgcccaccatcgcgtcgcagcccctgtccctgcgcccagaggcgtgccggccagcggcggggggcgcagtgcacacgagggggctggacttcgcctgtgatatctacatctgggcgcccttggccgggacttgtggggtccttctcctgtcactggttatcaccctttactgcaaacggggcagaaagaaactcctgtatatattcaaacaaccatttatgagaccagtacaaactactcaagaggaagatggctgtagctgccgatttccagaagaagaagaaggaggatgtgaactgagagtgaagttcagcaggagcgcagacgcccccgcgtacaagcagggccagaaccagctctataacgagctcaatctaggacgaagagaggagtacgatgttttggacaagaggcgtggccgggaccctgagatggggggaaagccgagaaggaagaaccctcaggaaggcctgtacaatgaactgcagaaagataagatggcggaggcctacagtgagattgggatgaaaggcgagcgccggaggggcaaggggcacgatggcctttaccagggtctcagtacagccaccaaggacacctacgacgcccttcacatgcaggccctgccccctcgctaa

SEQ ID NO: 247 - DNA, 3509 bp, Artificial Sequence
  Synthesized
atggccttaccagtgaccgccttgctcctgccgctggccttgctgctccacgccgccaggccggatattgtgatgacccagtccccgtcctccctgaccgtgaccgcgggcgaaaaagtgaccatgatttgcaaatcctcccagtccctgctgaattccggcgatcagaaaaattatctgacctggtatcagcagaaaccgggccagccgccgaaactgctgattttttgggcgtccacccgtgaatccggcgtgccggatcgttttaccggctccggctccggcaccgattttaccctgaccatttcctccgtgcaggcggaagatctggcggtgtattattgccagaatgattattcctatccgctgacctttggcgcgggcaccaaactggaactgaaaggcggcggcggctccggcggcggcggctccggcggcggcggctcccaggtgcagctgcagcagtccgatgcggaactggtgaaaccgggctcctccgtgaaaatttcctgcaaagcgtccggctatacctttaccgatcatgcgattcattgggtgaaacagaaaccggaacagggcctggaatggattggccatttttccccgggcaataccgatattaaatataatgataaatttaaaggcaaagcgaccctgaccgtggatcgttcctcctccaccgcgtatatgcagctgaattccctgacctccgaagattccgcggtgtatttttgcaaaacctccacctttttttttgattattggggccagggcaccaccctgaccgtgtcctccaccacgacgccagcgccgcgaccaccaacaccggcgcccaccatcgcgtcgcagcccctgtccctgcgcccagaggcgtgccggccagcggcggggggcgcagtgcacacgagggggctggacttcgcctgtgatatctacatctgggcgcccttggccgggacttgtggggtccttctcctgtcactggttatcaccctttactgcaaacggggcagaaagaaactcctgtatatattcaaacaaccatttatgagaccagtacaaactactcaagaggaagatggctgtagctgccgatttccagaagaagaagaaggaggatgtgaactgagagtgaagttcagcaggagcgcagacgcccccgcgtacaagcagggccagaaccagctctataacgagctcaatctaggacgaagagaggagtacgatgttttggacaagaggcgtggccgggaccctgagatggggggaaagccgagaaggaagaaccctcaggaaggcctgtacaatgaactgcagaaagataagatggcggaggcctacagtgagattgggatgaaaggcgagcgccggaggggcaaggggcacgatggcctttaccagggtctcagtacagccaccaaggacacctacgacgcccttcacatgcaggccctgccccctcgctaatctagaggcgcgcccctctccctcccccccccctaacgttactggccgaagccgcttggaataaggccggtgtgcgtttgtctatatgttattttccaccatattgccgtcttttggcaatgtgagggcccggaaacctggccctgtcttcttgacgagcattcctaggggtctttcccctctcgccaaaggaatgcaaggtctgttgaatgtcgtgaaggaagcagttcctctggaagcttcttgaagacaaacaacgtctgtagcgaccctttgcaggcagcggaaccccccacctggcgacaggtgcctctgcggccaaaagccacgtgtataagatacacctgcaaaggcggcacaaccccagtgccacgttgtgagttggatagttgtggaaagagtcaaatggctctcctcaagcgtattcaacaaggggctgaaggatgcccagaaggtaccccattgtatgggatctgatctggggcctcggtacacatgctttacatgtgtttagtcgaggttaaaaaaacgtctaggccccccgaaccacggggacgtggttttcctttgaaaaacacgatgataatatggccacaacccatatgatggccttaccagtgaccgccttgctcctgccgctggccttgctgctccacgccgccaggccggacatccagctcacccagtccccgagctcgctgtccgcctccgtgggagatcgggtcaccatcacgtgccgcgccagccagtcgatttcctcctacctgaactggtaccaacagaagcccggaaaagccccgaagcttctcatctacgccgcctcgagcctgcagtcaggagtgccctcacggttctccggctccggttccggtactgatttcaccctgaccatttcctccctgcaaccggaggacttcgctacttactactgccagcagtcgtactccaccccctacactttcggacaaggcaccaaggtcgaaatcaagggtggcggtggctcgggcggtggtgggtcgggtggcggcggatctgaagtgcaattggtggaatcagggggaggacttgtgcagcctggaggatcgctgagactgtcatgtgccgtgtccggctttgccctgtccaaccacgggatgtcctgggtccgccgcgcgcctggaaagggcctcgaatgggtgtcgggtattgtgtacagcggtagcacctactatgccgcatccgtgaaggggagattcaccatcagccgggacaactccaggaacactctgtacctccaaatgaattcgctgaggccagaggacactgccatctactactgctccgcgcatggcggagagtccgacgtctggggacaggggaccaccgtgaccgtgtctagcaccacgacgccagcgccgcgaccaccaacaccggcgcccaccatcgcgtcgcagcccctgtccctgcgcccagaggcgtgccggccagcggcggggggcgcagtgcacacgagggggctggacttcgcctgtgatatctacatctgggcgcccttggccgggacttgtggggtccttctcctgtcactggttatcaccaaacggggcagaaagaaactcctgtatatattcaaacaaccatttatgagaccagtacaaactactcaagaggaagatggctgtagctgccgatttccagaagaagaagaaggaggatgtgaactgagagtgaagttcagcaggagcgcagacgcccccgcgtacaagcagggccagaaccagctctataacgagctcaatctaggacgaagagaggagtacgatgttttggacaagaggcgtggccgggaccctgagatggggggaaagccgagaaggaagaaccctcaggaaggcctgtacaatgaactgcagaaagataagatggcggaggcctacagtgagattgggatgaaaggcgagcgccggaggggcaaggggcacgatggcctttaccagggtctcagtacagccaccaaggacacctacgacgcccttcacatgcaggccctgccccctcgctaa

SEQ ID NO: 248 - protein, 479 aa, Artificial Sequence
  Synthesized
MALPVTALLLPLALLLHAARPEIVLTQSPGTLSLSPGERATLSCRGGQSVSSSYLAWYQQKPGQAPRLLMYDASIRATGIPDRFSGSGSGTDFTLTISRLEPEDFAVYYCQQYQSWPLTFGQGTKVEIKGGGGSGGGGSGGGGSEVQLLESGGGLVQPGGSLRLSCAASGFTFSSYAMNWVRQAPGKGLEWVSAILSSGGSTYYADSVKGRFTISRDNSKNTLYLQMNSLRAEDTAVYYCARYWPMDIWGQGTLVTVSSTTTPAPRPPTPAPTIASQPLSLRPEACRPAAGGAVHTRGLDFACDIYIWAPLAGTCGVLLLSLVITKRGRKKLLYIFKQPFMRPVQTTQEEDGCSCRFPEEEEGGCELRVKFSRSADAPAYQQGQNQLYNELNLGRREEYDVLDKRRGRDPEMGGKPRRKNPQEGLYNELQKDKMAEAYSEIGMKGERRRGKGHDGLYQGLSTATKDTYDALHMQALPPR

SEQ ID NO: 249 - DNA, 3500 bp, Artificial Sequence
  Synthesized
atggccttaccagtgaccgccttgctcctgccgctggccttgctgctccacgccgccaggccggatattgtgatgacccagtccccgtcctccctgaccgtgaccgcgggcgaaaaagtgaccatgatttgcaaatcctcccagtccctgctgaattccggcgatcagaaaaattatctgacctggtatcagcagaaaccgggccagccgccgaaactgctgattttttgggcgtccacccgtgaatccggcgtgccggatcgttttaccggctccggctccggcaccgattttaccctgaccatttcctccgtgcaggcggaagatctggcggtgtattattgccagaatgattattcctatccgctgacctttggcgcgggcaccaaactggaactgaaaggcggcggcggctccggcggcggcggctccggcggcggcggctcccaggtgcagctgcagcagtccgatgcggaactggtgaaaccgggctcctccgtgaaaatttcctgcaaagcgtccggctatacctttaccgatcatgcgattcattgggtgaaacagaaaccggaacagggcctggaatggattggccatttttccccgggcaataccgatattaaatataatgataaatttaaaggcaaagcgaccctgaccgtggatcgttcctcctccaccgcgtatatgcagctgaattccctgacctccgaagattccgcggtgtatttttgcaaaacctccacctttttttttgattattggggccagggcaccaccctgaccgtgtcctccaccacgacgccagcgccgcgaccaccaacaccggcgcccaccatcgcgtcgcagcccctgtccctgcgcccagaggcgtgccggccagcggcggggggcgcagtgcacacgagggggctggacttcgcctgtgatatctacatctgggcgcccttggccgggacttgtggggtccttctcctgtcactggttatcaccaaacggggcagaaagaaactcctgtatatattcaaacaaccatttatgagaccagtacaaactactcaagaggaagatggctgtagctgccgatttccagaagaagaagaaggaggatgtgaactgagagtgaagttcagcaggagcgcagacgcccccgcgtacaagcagggccagaaccagctctataacgagctcaatctaggacgaagagaggagtacgatgttttggacaagaggcgtggccgggaccctgagatggggggaaagccgagaaggaagaaccctcaggaaggcctgtacaatgaactgcagaaagataagatggcggaggcctacagtgagattgggatgaaaggcgagcgccggaggggcaaggggcacgatggcctttaccagggtctcagtacagccaccaaggacacctacgacgcccttcacatgcaggccctgccccctcgctaatctagaggcgcgcccctctccctcccccccccctaacgttactggccgaagccgcttggaataaggccggtgtgcgtttgtctatatgttattttccaccatattgccgtcttttggcaatgtgagggcccggaaacctggccctgtcttcttgacgagcattcctaggggtctttcccctctcgccaaaggaatgcaaggtctgttgaatgtcgtgaaggaagcagttcctctggaagcttcttgaagacaaacaacgtctgtagcgaccctttgcaggcagcggaaccccccacctggcgacaggtgcctctgcggccaaaagccacgtgtataagatacacctgcaaaggcggcacaaccccagtgccacgttgtgagttggatagttgtggaaagagtcaaatggctctcctcaagcgtattcaacaaggggctgaaggatgcccagaaggtaccccattgtatgggatctgatctggggcctcggtacacatgctttacatgtgtttagtcgaggttaaaaaaacgtctaggccccccgaaccacggggacgtggttttcctttgaaaaacacgatgataatatggccacaacccatatgatggccttaccagtgaccgccttgctcctgccgctggccttgctgctccacgccgccaggccggacatccagctcacccagtccccgagctcgctgtccgcctccgtgggagatcgggtcaccatcacgtgccgcgccagccagtcgatttcctcctacctgaactggtaccaacagaagcccggaaaagccccgaagcttctcatctacgccgcctcgagcctgcagtcaggagtgccctcacggttctccggctccggttccggtactgatttcaccctgaccatttcctccctgcaaccggaggacttcgctacttactactgccagcagtcgtactccaccccctacactttcggacaaggcaccaaggtcgaaatcaagggtggcggtggctcgggcggtggtgggtcgggtggcggcggatctgaagtgcaattggtggaatcagggggaggacttgtgcagcctggaggatcgctgagactgtcatgtgccgtgtccggctttgccctgtccaaccacgggatgtcctgggtccgccgcgcgcctggaaagggcctcgaatgggtgtcgggtattgtgtacagcggtagcacctactatgccgcatccgtgaaggggagattcaccatcagccgggacaactccaggaacactctgtacctccaaatgaattcgctgaggccagaggacactgccatctactactgctccgcgcatggcggagagtccgacgtctggggacaggggaccaccgtgaccgtgtctagcaccacgacgccagcgccgcgaccaccaacaccggcgcccaccatcgcgtcgcagcccctgtccctgcgcccagaggcgtgccggccagcggcggggggcgcagtgcacacgagggggctggacttcgcctgtgatatctacatctgggcgcccttggccgggacttgtggggtccttctcctgtcactggttatcaccaaacggggcagaaagaaactcctgtatatattcaaacaaccatttatgagaccagtacaaactactcaagaggaagatggctgtagctgccgatttccagaagaagaagaaggaggatgtgaactgagagtgaagttcagcaggagcgcagacgcccccgcgtacaagcagggccagaaccagctctataacgagctcaatctaggacgaagagaggagtacgatgttttggacaagaggcgtggccgggaccctgagatggggggaaagccgagaaggaagaaccctcaggaaggcctgtacaatgaactgcagaaagataagatggcggaggcctacagtgagattgggatgaaaggcgagcgccggaggggcaaggggcacgatggcctttaccagggtctcagtacagccaccaaggacacctacgacgcccttcacatgcaggccctgccccctcgctaa

SEQ ID NO: 250 - DNA, 3518 bp, Artificial Sequence
  Synthesized
atggccttaccagtgaccgccttgctcctgccgctggccttgctgctccacgccgccaggccggacatcgtgatgacccagtccccctccagcctgacagtgacagccggcgagaaggtgacaatgatctgtaagtccagccagagcctgctgaacagcggcgaccagaagaactacctgacctggtaccagcagaagcctggccagccccccaagctgctgatcttctgggccagcacaagggagagcggcgtgcccgacagattcacaggcagcggcagcggcaccgacttcacactgaccatttcctccgtgcaggccgaggacctcgccgtgtactactgccagaacgactactcctaccccctgacattcggcgccggcaccaaactggagctgaagggtggcggtggctcgggcggtggtgggtcgggtggcggcggatctcaggtgcagctccagcagtccgatgccgagctggtgaagcccggaagcagcgtcaagatcagctgtaaggcctccggctacaccttcacagaccacgccatccactgggtgaagcagaagcccgagcagggcctggagtggatcggccactttagccccggaaacaccgacatcaagtacaacgacaagttcaagggcaaggccaccctgaccgtggacaggagcagcagcaccgcctacatgcagctgaacagcctgacaagcgaggacagcgccgtgtacttctgcaagacctccaccttcttcttcgactactggggccagggaaccaccctgacagtgtccagcaccacgacgccagcgccgcgaccaccaacaccggcgcccaccatcgcgtcgcagcccctgtccctgcgcccagaggcgtgccggccagcggcggggggcgcagtgcacacgagggggctggacttcgcctgtgatatctacatctgggcgcccttggccgggacttgtggggtccttctcctgtcactggttatcaccctttactgcaaacggggcagaaagaaactcctgtatatattcaaacaaccatttatgagaccagtacaaactactcaagaggaagatggctgtagctgccgatttccagaagaagaagaaggaggatgtgaactgagagtgaagttcagcaggagcgcagacgcccccgcgtacaagcagggccagaaccagctctataacgagctcaatctaggacgaagagaggagtacgatgttttggacaagaggcgtggccgggaccctgagatggggggaaagccgagaaggaagaaccctcaggaaggcctgtacaatgaactgcagaaagataagatggcggaggcctacagtgagattgggatgaaaggcgagcgccggaggggcaaggggcacgatggcctttaccagggtctcagtacagccaccaaggacacctacgacgcccttcacatgcaggccctgccccctcgctaatctagaggcgcgcccctctccctcccccccccctaacgttactggccgaagccgcttggaataaggccggtgtgcgtttgtctatatgttattttccaccatattgccgtcttttggcaatgtgagggcccggaaacctggccctgtcttcttgacgagcattcctaggggtctttcccctctcgccaaaggaatgcaaggtctgttgaatgtcgtgaaggaagcagttcctctggaagcttcttgaagacaaacaacgtctgtagcgaccctttgcaggcagcggaaccccccacctggcgacaggtgcctctgcggccaaaagccacgtgtataagatacacctgcaaaggcggcacaaccccagtgccacgttgtgagttggatagttgtggaaagagtcaaatggctctcctcaagcgtattcaacaaggggctgaaggatgcccagaaggtaccccattgtatgggatctgatctggggcctcggtacacatgctttacatgtgtttagtcgaggttaaaaaaacgtctaggccccccgaaccacggggacgtggttttcctttgaaaaacacgatgataatatggccacaacccatatgatggccttaccagtgaccgccttgctcctgccgctggccttgctgctccacgccgccaggccggacatccagctcacccagtccccgagctcgctgtccgcctccgtgggagatcgggtcaccatcacgtgccgcgccagccagtcgatttcctcctacctgaactggtaccaacagaagcccggaaaagccccgaagcttctcatctacgccgcctcgagcctgcagtcaggagtgccctcacggttctccggctccggttccggtactgatttcaccctgaccatttcctccctgcaaccggaggacttcgctacttactactgccagcagtcgtactccaccccctacactttcggacaaggcaccaaggtcgaaatcaagggtggcggtggctcgggcggtggtgggtcgggtggcggcggatctgaagtgcaattggtggaatcagggggaggacttgtgcagcctggaggatcgctgagactgtcatgtgccgtgtccggctttgccctgtccaaccacgggatgtcctgggtccgccgcgcgcctggaaagggcctcgaatgggtgtcgggtattgtgtacagcggtagcacctactatgccgcatccgtgaaggggagattcaccatcagccgggacaactccaggaacactctgtacctccaaatgaattcgctgaggccagaggacactgccatctactactgctccgcgcatggcggagagtccgacgtctggggacaggggaccaccgtgaccgtgtctagcaccacgacgccagcgccgcgaccaccaacaccggcgcccaccatcgcgtcgcagcccctgtccctgcgcccagaggcgtgccggccagcggcggggggcgcagtgcacacgagggggctggacttcgcctgtgatatctacatctgggcgcccttggccgggacttgtggggtccttctcctgtcactggttatcaccctttactgcaaacggggcagaaagaaactcctgtatatattcaaacaaccatttatgagaccagtacaaactactcaagaggaagatggctgtagctgccgatttccagaagaagaagaaggaggatgtgaactgagagtgaagttcagcaggagcgcagacgcccccgcgtacaagcagggccagaaccagctctataacgagctcaatctaggacgaagagaggagtacgatgttttggacaagaggcgtggccgggaccctgagatggggggaaagccgagaaggaagaaccctcaggaaggcctgtacaatgaactgcagaaagataagatggcggaggcctacagtgagattgggatgaaaggcgagcgccggaggggcaaggggcacgatggcctttaccagggtctcagtacagccaccaaggacacctacgacgcccttcacatgcaggccctgccccctcgctaa

SEQ ID NO: 251 - DNA, 3509 bp, Artificial Sequence
  Synthesized
atggccttaccagtgaccgccttgctcctgccgctggccttgctgctccacgccgccaggccggacatcgtgatgacccagtccccctccagcctgacagtgacagccggcgagaaggtgacaatgatctgtaagtccagccagagcctgctgaacagcggcgaccagaagaactacctgacctggtaccagcagaagcctggccagccccccaagctgctgatcttctgggccagcacaagggagagcggcgtgcccgacagattcacaggcagcggcagcggcaccgacttcacactgaccatttcctccgtgcaggccgaggacctcgccgtgtactactgccagaacgactactcctaccccctgacattcggcgccggcaccaaactggagctgaagggtggcggtggctcgggcggtggtgggtcgggtggcggcggatctcaggtgcagctccagcagtccgatgccgagctggtgaagcccggaagcagcgtcaagatcagctgtaaggcctccggctacaccttcacagaccacgccatccactgggtgaagcagaagcccgagcagggcctggagtggatcggccactttagccccggaaacaccgacatcaagtacaacgacaagttcaagggcaaggccaccctgaccgtggacaggagcagcagcaccgcctacatgcagctgaacagcctgacaagcgaggacagcgccgtgtacttctgcaagacctccaccttcttcttcgactactggggccagggaaccaccctgacagtgtccagcaccacgacgccagcgccgcgaccaccaacaccggcgcccaccatcgcgtcgcagcccctgtccctgcgcccagaggcgtgccggccagcggcggggggcgcagtgcacacgagggggctggacttcgcctgtgatatctacatctgggcgcccttggccgggacttgtggggtccttctcctgtcactggttatcaccaaacggggcagaaagaaactcctgtatatattcaaacaaccatttatgagaccagtacaaactactcaagaggaagatggctgtagctgccgatttccagaagaagaagaaggaggatgtgaactgagagtgaagttcagcaggagcgcagacgcccccgcgtacaagcagggccagaaccagctctataacgagctcaatctaggacgaagagaggagtacgatgttttggacaagaggcgtggccgggaccctgagatggggggaaagccgagaaggaagaaccctcaggaaggcctgtacaatgaactgcagaaagataagatggcggaggcctacagtgagattgggatgaaaggcgagcgccggaggggcaaggggcacgatggcctttaccagggtctcagtacagccaccaaggacacctacgacgcccttcacatgcaggccctgccccctcgctaatctagaggcgcgcccctctccctcccccccccctaacgttactggccgaagccgcttggaataaggccggtgtgcgtttgtctatatgttattttccaccatattgccgtcttttggcaatgtgagggcccggaaacctggccctgtcttcttgacgagcattcctaggggtctttcccctctcgccaaaggaatgcaaggtctgttgaatgtcgtgaaggaagcagttcctctggaagcttcttgaagacaaacaacgtctgtagcgaccctttgcaggcagcggaaccccccacctggcgacaggtgcctctgcggccaaaagccacgtgtataagatacacctgcaaaggcggcacaaccccagtgccacgttgtgagttggatagttgtggaaagagtcaaatggctctcctcaagcgtattcaacaaggggctgaaggatgcccagaaggtaccccattgtatgggatctgatctggggcctcggtacacatgctttacatgtgtttagtcgaggttaaaaaaacgtctaggccccccgaaccacggggacgtggttttcctttgaaaaacacgatgataatatggccacaacccatatgatggccttaccagtgaccgccttgctcctgccgctggccttgctgctccacgccgccaggccggacatccagctcacccagtccccgagctcgctgtccgcctccgtgggagatcgggtcaccatcacgtgccgcgccagccagtcgatttcctcctacctgaactggtaccaacagaagcccggaaaagccccgaagcttctcatctacgccgcctcgagcctgcagtcaggagtgccctcacggttctccggctccggttccggtactgatttcaccctgaccatttcctccctgcaaccggaggacttcgctacttactactgccagcagtcgtactccaccccctacactttcggacaaggcaccaaggtcgaaatcaagggtggcggtggctcgggcggtggtgggtcgggtggcggcggatctgaagtgcaattggtggaatcagggggaggacttgtgcagcctggaggatcgctgagactgtcatgtgccgtgtccggctttgccctgtccaaccacgggatgtcctgggtccgccgcgcgcctggaaagggcctcgaatgggtgtcgggtattgtgtacagcggtagcacctactatgccgcatccgtgaaggggagattcaccatcagccgggacaactccaggaacactctgtacctccaaatgaattcgctgaggccagaggacactgccatctactactgctccgcgcatggcggagagtccgacgtctggggacaggggaccaccgtgaccgtgtctagcaccacgacgccagcgccgcgaccaccaacaccggcgcccaccatcgcgtcgcagcccctgtccctgcgcccagaggcgtgccggccagcggcggggggcgcagtgcacacgagggggctggacttcgcctgtgatatctacatctgggcgcccttggccgggacttgtggggtccttctcctgtcactggttatcaccctttactgcaaacggggcagaaagaaactcctgtatatattcaaacaaccatttatgagaccagtacaaactactcaagaggaagatggctgtagctgccgatttccagaagaagaagaaggaggatgtgaactgagagtgaagttcagcaggagcgcagacgcccccgcgtacaagcagggccagaaccagctctataacgagctcaatctaggacgaagagaggagtacgatgttttggacaagaggcgtggccgggaccctgagatggggggaaagccgagaaggaagaaccctcaggaaggcctgtacaatgaactgcagaaagataagatggcggaggcctacagtgagattgggatgaaaggcgagcgccggaggggcaaggggcacgatggcctttaccagggtctcagtacagccaccaaggacacctacgacgcccttcacatgcaggccctgccccctcgctaa

SEQ ID NO: 252 - DNA, 3509 bp, Artificial Sequence
  Synthesized
atggccttaccagtgaccgccttgctcctgccgctggccttgctgctccacgccgccaggccggacatcgtgatgacccagtccccctccagcctgacagtgacagccggcgagaaggtgacaatgatctgtaagtccagccagagcctgctgaacagcggcgaccagaagaactacctgacctggtaccagcagaagcctggccagccccccaagctgctgatcttctgggccagcacaagggagagcggcgtgcccgacagattcacaggcagcggcagcggcaccgacttcacactgaccatttcctccgtgcaggccgaggacctcgccgtgtactactgccagaacgactactcctaccccctgacattcggcgccggcaccaaactggagctgaagggtggcggtggctcgggcggtggtgggtcgggtggcggcggatctcaggtgcagctccagcagtccgatgccgagctggtgaagcccggaagcagcgtcaagatcagctgtaaggcctccggctacaccttcacagaccacgccatccactgggtgaagcagaagcccgagcagggcctggagtggatcggccactttagccccggaaacaccgacatcaagtacaacgacaagttcaagggcaaggccaccctgaccgtggacaggagcagcagcaccgcctacatgcagctgaacagcctgacaagcgaggacagcgccgtgtacttctgcaagacctccaccttcttcttcgactactggggccagggaaccaccctgacagtgtccagcaccacgacgccagcgccgcgaccaccaacaccggcgcccaccatcgcgtcgcagcccctgtccctgcgcccagaggcgtgccggccagcggcggggggcgcagtgcacacgagggggctggacttcgcctgtgatatctacatctgggcgcccttggccgggacttgtggggtccttctcctgtcactggttatcaccctttactgcaaacggggcagaaagaaactcctgtatatattcaaacaaccatttatgagaccagtacaaactactcaagaggaagatggctgtagctgccgatttccagaagaagaagaaggaggatgtgaactgagagtgaagttcagcaggagcgcagacgcccccgcgtacaagcagggccagaaccagctctataacgagctcaatctaggacgaagagaggagtacgatgttttggacaagaggcgtggccgggaccctgagatggggggaaagccgagaaggaagaaccctcaggaaggcctgtacaatgaactgcagaaagataagatggcggaggcctacagtgagattgggatgaaaggcgagcgccggaggggcaaggggcacgatggcctttaccagggtctcagtacagccaccaaggacacctacgacgcccttcacatgcaggccctgccccctcgctaatctagaggcgcgcccctctccctcccccccccctaacgttactggccgaagccgcttggaataaggccggtgtgcgtttgtctatatgttattttccaccatattgccgtcttttggcaatgtgagggcccggaaacctggccctgtcttcttgacgagcattcctaggggtctttcccctctcgccaaaggaatgcaaggtctgttgaatgtcgtgaaggaagcagttcctctggaagcttcttgaagacaaacaacgtctgtagcgaccctttgcaggcagcggaaccccccacctggcgacaggtgcctctgcggccaaaagccacgtgtataagatacacctgcaaaggcggcacaaccccagtgccacgttgtgagttggatagttgtggaaagagtcaaatggctctcctcaagcgtattcaacaaggggctgaaggatgcccagaaggtaccccattgtatgggatctgatctggggcctcggtacacatgctttacatgtgtttagtcgaggttaaaaaaacgtctaggccccccgaaccacggggacgtggttttcctttgaaaaacacgatgataatatggccacaacccatatgatggccttaccagtgaccgccttgctcctgccgctggccttgctgctccacgccgccaggccggacatccagctcacccagtccccgagctcgctgtccgcctccgtgggagatcgggtcaccatcacgtgccgcgccagccagtcgatttcctcctacctgaactggtaccaacagaagcccggaaaagccccgaagcttctcatctacgccgcctcgagcctgcagtcaggagtgccctcacggttctccggctccggttccggtactgatttcaccctgaccatttcctccctgcaaccggaggacttcgctacttactactgccagcagtcgtactccaccccctacactttcggacaaggcaccaaggtcgaaatcaagggtggcggtggctcgggcggtggtgggtcgggtggcggcggatctgaagtgcaattggtggaatcagggggaggacttgtgcagcctggaggatcgctgagactgtcatgtgccgtgtccggctttgccctgtccaaccacgggatgtcctgggtccgccgcgcgcctggaaagggcctcgaatgggtgtcgggtattgtgtacagcggtagcacctactatgccgcatccgtgaaggggagattcaccatcagccgggacaactccaggaacactctgtacctccaaatgaattcgctgaggccagaggacactgccatctactactgctccgcgcatggcggagagtccgacgtctggggacaggggaccaccgtgaccgtgtctagcaccacgacgccagcgccgcgaccaccaacaccggcgcccaccatcgcgtcgcagcccctgtccctgcgcccagaggcgtgccggccagcggcggggggcgcagtgcacacgagggggctggacttcgcctgtgatatctacatctgggcgcccttggccgggacttgtggggtccttctcctgtcactggttatcaccaaacggggcagaaagaaactcctgtatatattcaaacaaccatttatgagaccagtacaaactactcaagaggaagatggctgtagctgccgatttccagaagaagaagaaggaggatgtgaactgagagtgaagttcagcaggagcgcagacgcccccgcgtacaagcagggccagaaccagctctataacgagctcaatctaggacgaagagaggagtacgatgttttggacaagaggcgtggccgggaccctgagatggggggaaagccgagaaggaagaaccctcaggaaggcctgtacaatgaactgcagaaagataagatggcggaggcctacagtgagattgggatgaaaggcgagcgccggaggggcaaggggcacgatggcctttaccagggtctcagtacagccaccaaggacacctacgacgcccttcacatgcaggccctgccccctcgctaa

SEQ ID NO: 253 - DNA, 3500 bp, Artificial Sequence
  Synthesized
atggccttaccagtgaccgccttgctcctgccgctggccttgctgctccacgccgccaggccggacatcgtgatgacccagtccccctccagcctgacagtgacagccggcgagaaggtgacaatgatctgtaagtccagccagagcctgctgaacagcggcgaccagaagaactacctgacctggtaccagcagaagcctggccagccccccaagctgctgatcttctgggccagcacaagggagagcggcgtgcccgacagattcacaggcagcggcagcggcaccgacttcacactgaccatttcctccgtgcaggccgaggacctcgccgtgtactactgccagaacgactactcctaccccctgacattcggcgccggcaccaaactggagctgaagggtggcggtggctcgggcggtggtgggtcgggtggcggcggatctcaggtgcagctccagcagtccgatgccgagctggtgaagcccggaagcagcgtcaagatcagctgtaaggcctccggctacaccttcacagaccacgccatccactgggtgaagcagaagcccgagcagggcctggagtggatcggccactttagccccggaaacaccgacatcaagtacaacgacaagttcaagggcaaggccaccctgaccgtggacaggagcagcagcaccgcctacatgcagctgaacagcctgacaagcgaggacagcgccgtgtacttctgcaagacctccaccttcttcttcgactactggggccagggaaccaccctgacagtgtccagcaccacgacgccagcgccgcgaccaccaacaccggcgcccaccatcgcgtcgcagcccctgtccctgcgcccagaggcgtgccggccagcggcggggggcgcagtgcacacgagggggctggacttcgcctgtgatatctacatctgggcgcccttggccgggacttgtggggtccttctcctgtcactggttatcaccaaacggggcagaaagaaactcctgtatatattcaaacaaccatttatgagaccagtacaaactactcaagaggaagatggctgtagctgccgatttccagaagaagaagaaggaggatgtgaactgagagtgaagttcagcaggagcgcagacgcccccgcgtacaagcagggccagaaccagctctataacgagctcaatctaggacgaagagaggagtacgatgttttggacaagaggcgtggccgggaccctgagatggggggaaagccgagaaggaagaaccctcaggaaggcctgtacaatgaactgcagaaagataagatggcggaggcctacagtgagattgggatgaaaggcgagcgccggaggggcaaggggcacgatggcctttaccagggtctcagtacagccaccaaggacacctacgacgcccttcacatgcaggccctgccccctcgctaatctagaggcgcgcccctctccctcccccccccctaacgttactggccgaagccgcttggaataaggccggtgtgcgtttgtctatatgttattttccaccatattgccgtcttttggcaatgtgagggcccggaaacctggccctgtcttcttgacgagcattcctaggggtctttcccctctcgccaaaggaatgcaaggtctgttgaatgtcgtgaaggaagcagttcctctggaagcttcttgaagacaaacaacgtctgtagcgaccctttgcaggcagcggaaccccccacctggcgacaggtgcctctgcggccaaaagccacgtgtataagatacacctgcaaaggcggcacaaccccagtgccacgttgtgagttggatagttgtggaaagagtcaaatggctctcctcaagcgtattcaacaaggggctgaaggatgcccagaaggtaccccattgtatgggatctgatctggggcctcggtacacatgctttacatgtgtttagtcgaggttaaaaaaacgtctaggccccccgaaccacggggacgtggttttcctttgaaaaacacgatgataatatggccacaacccatatgatggccttaccagtgaccgccttgctcctgccgctggccttgctgctccacgccgccaggccggacatccagctcacccagtccccgagctcgctgtccgcctccgtgggagatcgggtcaccatcacgtgccgcgccagccagtcgatttcctcctacctgaactggtaccaacagaagcccggaaaagccccgaagcttctcatctacgccgcctcgagcctgcagtcaggagtgccctcacggttctccggctccggttccggtactgatttcaccctgaccatttcctccctgcaaccggaggacttcgctacttactactgccagcagtcgtactccaccccctacactttcggacaaggcaccaaggtcgaaatcaagggtggcggtggctcgggcggtggtgggtcgggtggcggcggatctgaagtgcaattggtggaatcagggggaggacttgtgcagcctggaggatcgctgagactgtcatgtgccgtgtccggctttgccctgtccaaccacgggatgtcctgggtccgccgcgcgcctggaaagggcctcgaatgggtgtcgggtattgtgtacagcggtagcacctactatgccgcatccgtgaaggggagattcaccatcagccgggacaactccaggaacactctgtacctccaaatgaattcgctgaggccagaggacactgccatctactactgctccgcgcatggcggagagtccgacgtctggggacaggggaccaccgtgaccgtgtctagcaccacgacgccagcgccgcgaccaccaacaccggcgcccaccatcgcgtcgcagcccctgtccctgcgcccagaggcgtgccggccagcggcggggggcgcagtgcacacgagggggctggacttcgcctgtgatatctacatctgggcgcccttggccgggacttgtggggtccttctcctgtcactggttatcaccaaacggggcagaaagaaactcctgtatatattcaaacaaccatttatgagaccagtacaaactactcaagaggaagatggctgtagctgccgatttccagaagaagaagaaggaggatgtgaactgagagtgaagttcagcaggagcgcagacgcccccgcgtacaagcagggccagaaccagctctataacgagctcaatctaggacgaagagaggagtacgatgttttggacaagaggcgtggccgggaccctgagatggggggaaagccgagaaggaagaaccctcaggaaggcctgtacaatgaactgcagaaagataagatggcggaggcctacagtgagattgggatgaaaggcgagcgccggaggggcaaggggcacgatggcctttaccagggtctcagtacagccaccaaggacacctacgacgcccttcacatgcaggccctgccccctcgctaa

SEQ ID NO: 254 - DNA, 3545 bp, Artificial Sequence
  Synthesized
atggccttaccagtgaccgccttgctcctgccgctggccttgctgctccacgccgccaggccggatattgtgatgacccagtccccgtcctccctgaccgtgaccgcgggcgaaaaagtgaccatgatttgcaaatcctcccagtccctgctgaattccggcgatcagaaaaattatctgacctggtatcagcagaaaccgggccagccgccgaaactgctgattttttgggcgtccacccgtgaatccggcgtgccggatcgttttaccggctccggctccggcaccgattttaccctgaccatttcctccgtgcaggcggaagatctggcggtgtattattgccagaatgattattcctatccgctgacctttggcgcgggcaccaaactggaactgaaaggcggcggcggctccggcggcggcggctccggcggcggcggctcccaggtgcagctgcagcagtccgatgcggaactggtgaaaccgggctcctccgtgaaaatttcctgcaaagcgtccggctatacctttaccgatcatgcgattcattgggtgaaacagaaaccggaacagggcctggaatggattggccatttttccccgggcaataccgatattaaatataatgataaatttaaaggcaaagcgaccctgaccgtggatcgttcctcctccaccgcgtatatgcagctgaattccctgacctccgaagattccgcggtgtatttttgcaaaacctccacctttttttttgattattggggccagggcaccaccctgaccgtgtcctccaccacgacgccagcgccgcgaccaccaacaccggcgcccaccatcgcgtcgcagcccctgtccctgcgcccagaggcgtgccggccagcggcggggggcgcagtgcacacgagggggctggacttcgcctgtgatatctacatctgggcgcccttggccgggacttgtggggtccttctcctgtcactggttatcaccctttactgcaaacggggcagaaagaaactcctgtatatattcaaacaaccatttatgagaccagtacaaactactcaagaggaagatggctgtagctgccgatttccagaagaagaagaaggaggatgtgaactgagagtgaagttcagcaggagcgcagacgcccccgcgtacaagcagggccagaaccagctctataacgagctcaatctaggacgaagagaggagtacgatgttttggacaagaggcgtggccgggaccctgagatggggggaaagccgagaaggaagaaccctcaggaaggcctgtacaatgaactgcagaaagataagatggcggaggcctacagtgagattgggatgaaaggcgagcgccggaggggcaaggggcacgatggcctttaccagggtctcagtacagccaccaaggacacctacgacgcccttcacatgcaggccctgccccctcgctaatctagaggcgcgcccctctccctcccccccccctaacgttactggccgaagccgcttggaataaggccggtgtgcgtttgtctatatgttattttccaccatattgccgtcttttggcaatgtgagggcccggaaacctggccctgtcttcttgacgagcattcctaggggtctttcccctctcgccaaaggaatgcaaggtctgttgaatgtcgtgaaggaagcagttcctctggaagcttcttgaagacaaacaacgtctgtagcgaccctttgcaggcagcggaaccccccacctggcgacaggtgcctctgcggccaaaagccacgtgtataagatacacctgcaaaggcggcacaaccccagtgccacgttgtgagttggatagttgtggaaagagtcaaatggctctcctcaagcgtattcaacaaggggctgaaggatgcccagaaggtaccccattgtatgggatctgatctggggcctcggtacacatgctttacatgtgtttagtcgaggttaaaaaaacgtctaggccccccgaaccacggggacgtggttttcctttgaaaaacacgatgataatatggccacaacccatatgatggccttaccagtgaccgccttgctcctgccgctggccttgctgctccacgccgccaggccggagatcgtgatgacccagtcccccctgtccctgcccgtgacccccggcgagcccgcctccatctcctgccggtcctcccagtccctgctgcactccaacggctacaactacctggactggtacctgcagaagcccggccagtccccccagctgctgatctacctgggctccaaccgggcctccggcgtgcccgaccggttctccggctccggctccggcaccgacttcaccctgaagatctcccgggtggaggccgaggacgtgggcgtgtactactgcatgcaggccctgcagacccccaccttcggccccggcaccaaggtggacatcaagggcggcggcggctccggcggcggcggctccggcggcggcggctcccaggtgcagctggtgcagtccggcggcggcgtggtgcagcccggcaagtccctgcggctgtcctgcgccgcctccggcttcaccttctccatcttcgccatgcactgggtgcggcaggcccccggcaagggcctggagtgggtggccaccatctcctacgacggctccaacgccttctacgccgactccgtggagggccggttcaccatctcccgggacaactccaaggactccctgtacctgcagatggactccctgcggcccgaggacaccgccgtgtactactgcgtgaaggccggcgacggcggctacgacgtgttcgactcctggggccagggcaccctggtgaccgtgtcctccaccacgacgccagcgccgcgaccaccaacaccggcgcccaccatcgcgtcgcagcccctgtccctgcgcccagaggcgtgccggccagcggcggggggcgcagtgcacacgagggggctggacttcgcctgtgatatctacatctgggcgcccttggccgggacttgtggggtccttctcctgtcactggttatcaccctttactgcaaacggggcagaaagaaactcctgtatatattcaaacaaccatttatgagaccagtacaaactactcaagaggaagatggctgtagctgccgatttccagaagaagaagaaggaggatgtgaactgagagtgaagttcagcaggagcgcagacgcccccgcgtacaagcagggccagaaccagctctataacgagctcaatctaggacgaagagaggagtacgatgttttggacaagaggcgtggccgggaccctgagatggggggaaagccgagaaggaagaaccctcaggaaggcctgtacaatgaactgcagaaagataagatggcggaggcctacagtgagattgggatgaaaggcgagcgccggaggggcaaggggcacgatggcctttaccagggtctcagtacagccaccaaggacacctacgacgcccttcacatgcaggccctgccccctcgctaa

SEQ ID NO: 255 - protein, 490 aa, Artificial Sequence
  Synthesized
MALPVTALLLPLALLLHAARPEIVMTQSPLSLPVTPGEPASISCRSSQSLLHSNGYNYLDWYLQKPGQSPQLLIYLGSNRASGVPDRFSGSGSGTDFTLKISRVEAEDVGVYYCMQALQTPTFGPGTKVDIKGGGGSGGGGSGGGGSQVQLVQSGGGVVQPGKSLRLSCAASGFTFSIFAMHWVRQAPGKGLEWVATISYDGSNAFYADSVEGRFTISRDNSKDSLYLQMDSLRPEDTAVYYCVKAGDGGYDVFDSWGQGTLVTVSSTTTPAPRPPTPAPTIASQPLSLRPEACRPAAGGAVHTRGLDFACDIYIWAPLAGTCGVLLLSLVITLYCKRGRKKLLYIFKQPFMRPVQTTQEEDGCSCRFPEEEEGGCELRVKFSRSADAPAYQQGQNQLYNELNLGRREEYDVLDKRRGRDPEMGGKPRRKNPQEGLYNELQKDKMAEAYSEIGMKGERRRGKGHDGLYQGLSTATKDTYDALHMQALPPR

SEQ ID NO: 256 - DNA, 3536 bp, Artificial Sequence
  Synthesized
atggccttaccagtgaccgccttgctcctgccgctggccttgctgctccacgccgccaggccggatattgtgatgacccagtccccgtcctccctgaccgtgaccgcgggcgaaaaagtgaccatgatttgcaaatcctcccagtccctgctgaattccggcgatcagaaaaattatctgacctggtatcagcagaaaccgggccagccgccgaaactgctgattttttgggcgtccacccgtgaatccggcgtgccggatcgttttaccggctccggctccggcaccgattttaccctgaccatttcctccgtgcaggcggaagatctggcggtgtattattgccagaatgattattcctatccgctgacctttggcgcgggcaccaaactggaactgaaaggcggcggcggctccggcggcggcggctccggcggcggcggctcccaggtgcagctgcagcagtccgatgcggaactggtgaaaccgggctcctccgtgaaaatttcctgcaaagcgtccggctatacctttaccgatcatgcgattcattgggtgaaacagaaaccggaacagggcctggaatggattggccatttttccccgggcaataccgatattaaatataatgataaatttaaaggcaaagcgaccctgaccgtggatcgttcctcctccaccgcgtatatgcagctgaattccctgacctccgaagattccgcggtgtatttttgcaaaacctccacctttttttttgattattggggccagggcaccaccctgaccgtgtcctccaccacgacgccagcgccgcgaccaccaacaccggcgcccaccatcgcgtcgcagcccctgtccctgcgcccagaggcgtgccggccagcggcggggggcgcagtgcacacgagggggctggacttcgcctgtgatatctacatctgggcgcccttggccgggacttgtggggtccttctcctgtcactggttatcaccaaacggggcagaaagaaactcctgtatatattcaaacaaccatttatgagaccagtacaaactactcaagaggaagatggctgtagctgccgatttccagaagaagaagaaggaggatgtgaactgagagtgaagttcagcaggagcgcagacgcccccgcgtacaagcagggccagaaccagctctataacgagctcaatctaggacgaagagaggagtacgatgttttggacaagaggcgtggccgggaccctgagatggggggaaagccgagaaggaagaaccctcaggaaggcctgtacaatgaactgcagaaagataagatggcggaggcctacagtgagattgggatgaaaggcgagcgccggaggggcaaggggcacgatggcctttaccagggtctcagtacagccaccaaggacacctacgacgcccttcacatgcaggccctgccccctcgctaatctagaggcgcgcccctctccctcccccccccctaacgttactggccgaagccgcttggaataaggccggtgtgcgtttgtctatatgttattttccaccatattgccgtcttttggcaatgtgagggcccggaaacctggccctgtcttcttgacgagcattcctaggggtctttcccctctcgccaaaggaatgcaaggtctgttgaatgtcgtgaaggaagcagttcctctggaagcttcttgaagacaaacaacgtctgtagcgaccctttgcaggcagcggaaccccccacctggcgacaggtgcctctgcggccaaaagccacgtgtataagatacacctgcaaaggcggcacaaccccagtgccacgttgtgagttggatagttgtggaaagagtcaaatggctctcctcaagcgtattcaacaaggggctgaaggatgcccagaaggtaccccattgtatgggatctgatctggggcctcggtacacatgctttacatgtgtttagtcgaggttaaaaaaacgtctaggccccccgaaccacggggacgtggttttcctttgaaaaacacgatgataatatggccacaacccatatgatggccttaccagtgaccgccttgctcctgccgctggccttgctgctccacgccgccaggccggagatcgtgatgacccagtcccccctgtccctgcccgtgacccccggcgagcccgcctccatctcctgccggtcctcccagtccctgctgcactccaacggctacaactacctggactggtacctgcagaagcccggccagtccccccagctgctgatctacctgggctccaaccgggcctccggcgtgcccgaccggttctccggctccggctccggcaccgacttcaccctgaagatctcccgggtggaggccgaggacgtgggcgtgtactactgcatgcaggccctgcagacccccaccttcggccccggcaccaaggtggacatcaagggcggcggcggctccggcggcggcggctccggcggcggcggctcccaggtgcagctggtgcagtccggcggcggcgtggtgcagcccggcaagtccctgcggctgtcctgcgccgcctccggcttcaccttctccatcttcgccatgcactgggtgcggcaggcccccggcaagggcctggagtgggtggccaccatctcctacgacggctccaacgccttctacgccgactccgtggagggccggttcaccatctcccgggacaactccaaggactccctgtacctgcagatggactccctgcggcccgaggacaccgccgtgtactactgcgtgaaggccggcgacggcggctacgacgtgttcgactcctggggccagggcaccctggtgaccgtgtcctccaccacgacgccagcgccgcgaccaccaacaccggcgcccaccatcgcgtcgcagcccctgtccctgcgcccagaggcgtgccggccagcggcggggggcgcagtgcacacgagggggctggacttcgcctgtgatatctacatctgggcgcccttggccgggacttgtggggtccttctcctgtcactggttatcaccctttactgcaaacggggcagaaagaaactcctgtatatattcaaacaaccatttatgagaccagtacaaactactcaagaggaagatggctgtagctgccgatttccagaagaagaagaaggaggatgtgaactgagagtgaagttcagcaggagcgcagacgcccccgcgtacaagcagggccagaaccagctctataacgagctcaatctaggacgaagagaggagtacgatgttttggacaagaggcgtggccgggaccctgagatggggggaaagccgagaaggaagaaccctcaggaaggcctgtacaatgaactgcagaaagataagatggcggaggcctacagtgagattgggatgaaaggcgagcgccggaggggcaaggggcacgatggcctttaccagggtctcagtacagccaccaaggacacctacgacgcccttcacatgcaggccctgccccctcgctaa

SEQ ID NO: 257 - DNA, 3536 bp, Artificial Sequence
  Synthesized
atggccttaccagtgaccgccttgctcctgccgctggccttgctgctccacgccgccaggccggatattgtgatgacccagtccccgtcctccctgaccgtgaccgcgggcgaaaaagtgaccatgatttgcaaatcctcccagtccctgctgaattccggcgatcagaaaaattatctgacctggtatcagcagaaaccgggccagccgccgaaactgctgattttttgggcgtccacccgtgaatccggcgtgccggatcgttttaccggctccggctccggcaccgattttaccctgaccatttcctccgtgcaggcggaagatctggcggtgtattattgccagaatgattattcctatccgctgacctttggcgcgggcaccaaactggaactgaaaggcggcggcggctccggcggcggcggctccggcggcggcggctcccaggtgcagctgcagcagtccgatgcggaactggtgaaaccgggctcctccgtgaaaatttcctgcaaagcgtccggctatacctttaccgatcatgcgattcattgggtgaaacagaaaccggaacagggcctggaatggattggccatttttccccgggcaataccgatattaaatataatgataaatttaaaggcaaagcgaccctgaccgtggatcgttcctcctccaccgcgtatatgcagctgaattccctgacctccgaagattccgcggtgtatttttgcaaaacctccacctttttttttgattattggggccagggcaccaccctgaccgtgtcctccaccacgacgccagcgccgcgaccaccaacaccggcgcccaccatcgcgtcgcagcccctgtccctgcgcccagaggcgtgccggccagcggcggggggcgcagtgcacacgagggggctggacttcgcctgtgatatctacatctgggcgcccttggccgggacttgtggggtccttctcctgtcactggttatcaccctttactgcaaacggggcagaaagaaactcctgtatatattcaaacaaccatttatgagaccagtacaaactactcaagaggaagatggctgtagctgccgatttccagaagaagaagaaggaggatgtgaactgagagtgaagttcagcaggagcgcagacgcccccgcgtacaagcagggccagaaccagctctataacgagctcaatctaggacgaagagaggagtacgatgttttggacaagaggcgtggccgggaccctgagatggggggaaagccgagaaggaagaaccctcaggaaggcctgtacaatgaactgcagaaagataagatggcggaggcctacagtgagattgggatgaaaggcgagcgccggaggggcaaggggcacgatggcctttaccagggtctcagtacagccaccaaggacacctacgacgcccttcacatgcaggccctgccccctcgctaatctagaggcgcgcccctctccctcccccccccctaacgttactggccgaagccgcttggaataaggccggtgtgcgtttgtctatatgttattttccaccatattgccgtcttttggcaatgtgagggcccggaaacctggccctgtcttcttgacgagcattcctaggggtctttcccctctcgccaaaggaatgcaaggtctgttgaatgtcgtgaaggaagcagttcctctggaagcttcttgaagacaaacaacgtctgtagcgaccctttgcaggcagcggaaccccccacctggcgacaggtgcctctgcggccaaaagccacgtgtataagatacacctgcaaaggcggcacaaccccagtgccacgttgtgagttggatagttgtggaaagagtcaaatggctctcctcaagcgtattcaacaaggggctgaaggatgcccagaaggtaccccattgtatgggatctgatctggggcctcggtacacatgctttacatgtgtttagtcgaggttaaaaaaacgtctaggccccccgaaccacggggacgtggttttcctttgaaaaacacgatgataatatggccacaacccatatgatggccttaccagtgaccgccttgctcctgccgctggccttgctgctccacgccgccaggccggagatcgtgatgacccagtcccccctgtccctgcccgtgacccccggcgagcccgcctccatctcctgccggtcctcccagtccctgctgcactccaacggctacaactacctggactggtacctgcagaagcccggccagtccccccagctgctgatctacctgggctccaaccgggcctccggcgtgcccgaccggttctccggctccggctccggcaccgacttcaccctgaagatctcccgggtggaggccgaggacgtgggcgtgtactactgcatgcaggccctgcagacccccaccttcggccccggcaccaaggtggacatcaagggcggcggcggctccggcggcggcggctccggcggcggcggctcccaggtgcagctggtgcagtccggcggcggcgtggtgcagcccggcaagtccctgcggctgtcctgcgccgcctccggcttcaccttctccatcttcgccatgcactgggtgcggcaggcccccggcaagggcctggagtgggtggccaccatctcctacgacggctccaacgccttctacgccgactccgtggagggccggttcaccatctcccgggacaactccaaggactccctgtacctgcagatggactccctgcggcccgaggacaccgccgtgtactactgcgtgaaggccggcgacggcggctacgacgtgttcgactcctggggccagggcaccctggtgaccgtgtcctccaccacgacgccagcgccgcgaccaccaacaccggcgcccaccatcgcgtcgcagcccctgtccctgcgcccagaggcgtgccggccagcggcggggggcgcagtgcacacgagggggctggacttcgcctgtgatatctacatctgggcgcccttggccgggacttgtggggtccttctcctgtcactggttatcaccaaacggggcagaaagaaactcctgtatatattcaaacaaccatttatgagaccagtacaaactactcaagaggaagatggctgtagctgccgatttccagaagaagaagaaggaggatgtgaactgagagtgaagttcagcaggagcgcagacgcccccgcgtacaagcagggccagaaccagctctataacgagctcaatctaggacgaagagaggagtacgatgttttggacaagaggcgtggccgggaccctgagatggggggaaagccgagaaggaagaaccctcaggaaggcctgtacaatgaactgcagaaagataagatggcggaggcctacagtgagattgggatgaaaggcgagcgccggaggggcaaggggcacgatggcctttaccagggtctcagtacagccaccaaggacacctacgacgcccttcacatgcaggccctgccccctcgctaa

SEQ ID NO: 258 - protein, 487 aa, Artificial Sequence
  Synthesized
MALPVTALLLPLALLLHAARPEIVMTQSPLSLPVTPGEPASISCRSSQSLLHSNGYNYLDWYLQKPGQSPQLLIYLGSNRASGVPDRFSGSGSGTDFTLKISRVEAEDVGVYYCMQALQTPTFGPGTKVDIKGGGGSGGGGSGGGGSQVQLVQSGGGVVQPGKSLRLSCAASGFTFSIFAMHWVRQAPGKGLEWVATISYDGSNAFYADSVEGRFTISRDNSKDSLYLQMDSLRPEDTAVYYCVKAGDGGYDVFDSWGQGTLVTVSSTTTPAPRPPTPAPTIASQPLSLRPEACRPAAGGAVHTRGLDFACDIYIWAPLAGTCGVLLLSLVITKRGRKKLLYIFKQPFMRPVQTTQEEDGCSCRFPEEEEGGCELRVKFSRSADAPAYQQGQNQLYNELNLGRREEYDVLDKRRGRDPEMGGKPRRKNPQEGLYNELQKDKMAEAYSEIGMKGERRRGKGHDGLYQGLSTATKDTYDALHMQALPPR

SEQ ID NO: 259 - DNA, 3527 bp, Artificial Sequence
  Synthesized
atggccttaccagtgaccgccttgctcctgccgctggccttgctgctccacgccgccaggccggatattgtgatgacccagtccccgtcctccctgaccgtgaccgcgggcgaaaaagtgaccatgatttgcaaatcctcccagtccctgctgaattccggcgatcagaaaaattatctgacctggtatcagcagaaaccgggccagccgccgaaactgctgattttttgggcgtccacccgtgaatccggcgtgccggatcgttttaccggctccggctccggcaccgattttaccctgaccatttcctccgtgcaggcggaagatctggcggtgtattattgccagaatgattattcctatccgctgacctttggcgcgggcaccaaactggaactgaaaggcggcggcggctccggcggcggcggctccggcggcggcggctcccaggtgcagctgcagcagtccgatgcggaactggtgaaaccgggctcctccgtgaaaatttcctgcaaagcgtccggctatacctttaccgatcatgcgattcattgggtgaaacagaaaccggaacagggcctggaatggattggccatttttccccgggcaataccgatattaaatataatgataaatttaaaggcaaagcgaccctgaccgtggatcgttcctcctccaccgcgtatatgcagctgaattccctgacctccgaagattccgcggtgtatttttgcaaaacctccacctttttttttgattattggggccagggcaccaccctgaccgtgtcctccaccacgacgccagcgccgcgaccaccaacaccggcgcccaccatcgcgtcgcagcccctgtccctgcgcccagaggcgtgccggccagcggcggggggcgcagtgcacacgagggggctggacttcgcctgtgatatctacatctgggcgcccttggccgggacttgtggggtccttctcctgtcactggttatcaccaaacggggcagaaagaaactcctgtatatattcaaacaaccatttatgagaccagtacaaactactcaagaggaagatggctgtagctgccgatttccagaagaagaagaaggaggatgtgaactgagagtgaagttcagcaggagcgcagacgcccccgcgtacaagcagggccagaaccagctctataacgagctcaatctaggacgaagagaggagtacgatgttttggacaagaggcgtggccgggaccctgagatggggggaaagccgagaaggaagaaccctcaggaaggcctgtacaatgaactgcagaaagataagatggcggaggcctacagtgagattgggatgaaaggcgagcgccggaggggcaaggggcacgatggcctttaccagggtctcagtacagccaccaaggacacctacgacgcccttcacatgcaggccctgccccctcgctaatctagaggcgcgcccctctccctcccccccccctaacgttactggccgaagccgcttggaataaggccggtgtgcgtttgtctatatgttattttccaccatattgccgtcttttggcaatgtgagggcccggaaacctggccctgtcttcttgacgagcattcctaggggtctttcccctctcgccaaaggaatgcaaggtctgttgaatgtcgtgaaggaagcagttcctctggaagcttcttgaagacaaacaacgtctgtagcgaccctttgcaggcagcggaaccccccacctggcgacaggtgcctctgcggccaaaagccacgtgtataagatacacctgcaaaggcggcacaaccccagtgccacgttgtgagttggatagttgtggaaagagtcaaatggctctcctcaagcgtattcaacaaggggctgaaggatgcccagaaggtaccccattgtatgggatctgatctggggcctcggtacacatgctttacatgtgtttagtcgaggttaaaaaaacgtctaggccccccgaaccacggggacgtggttttcctttgaaaaacacgatgataatatggccacaacccatatgatggccttaccagtgaccgccttgctcctgccgctggccttgctgctccacgccgccaggccggagatcgtgatgacccagtcccccctgtccctgcccgtgacccccggcgagcccgcctccatctcctgccggtcctcccagtccctgctgcactccaacggctacaactacctggactggtacctgcagaagcccggccagtccccccagctgctgatctacctgggctccaaccgggcctccggcgtgcccgaccggttctccggctccggctccggcaccgacttcaccctgaagatctcccgggtggaggccgaggacgtgggcgtgtactactgcatgcaggccctgcagacccccaccttcggccccggcaccaaggtggacatcaagggcggcggcggctccggcggcggcggctccggcggcggcggctcccaggtgcagctggtgcagtccggcggcggcgtggtgcagcccggcaagtccctgcggctgtcctgcgccgcctccggcttcaccttctccatcttcgccatgcactgggtgcggcaggcccccggcaagggcctggagtgggtggccaccatctcctacgacggctccaacgccttctacgccgactccgtggagggccggttcaccatctcccgggacaactccaaggactccctgtacctgcagatggactccctgcggcccgaggacaccgccgtgtactactgcgtgaaggccggcgacggcggctacgacgtgttcgactcctggggccagggcaccctggtgaccgtgtcctccaccacgacgccagcgccgcgaccaccaacaccggcgcccaccatcgcgtcgcagcccctgtccctgcgcccagaggcgtgccggccagcggcggggggcgcagtgcacacgagggggctggacttcgcctgtgatatctacatctgggcgcccttggccgggacttgtggggtccttctcctgtcactggttatcaccaaacggggcagaaagaaactcctgtatatattcaaacaaccatttatgagaccagtacaaactactcaagaggaagatggctgtagctgccgatttccagaagaagaagaaggaggatgtgaactgagagtgaagttcagcaggagcgcagacgcccccgcgtacaagcagggccagaaccagctctataacgagctcaatctaggacgaagagaggagtacgatgttttggacaagaggcgtggccgggaccctgagatggggggaaagccgagaaggaagaaccctcaggaaggcctgtacaatgaactgcagaaagataagatggcggaggcctacagtgagattgggatgaaaggcgagcgccggaggggcaaggggcacgatggcctttaccagggtctcagtacagccaccaaggacacctacgacgcccttcacatgcaggccctgccccctcgctaa

SEQ ID NO: 260 - DNA, 3545 bp, Artificial Sequence
  Synthesized
atggccttaccagtgaccgccttgctcctgccgctggccttgctgctccacgccgccaggccggacatcgtgatgacccagtccccctccagcctgacagtgacagccggcgagaaggtgacaatgatctgtaagtccagccagagcctgctgaacagcggcgaccagaagaactacctgacctggtaccagcagaagcctggccagccccccaagctgctgatcttctgggccagcacaagggagagcggcgtgcccgacagattcacaggcagcggcagcggcaccgacttcacactgaccatttcctccgtgcaggccgaggacctcgccgtgtactactgccagaacgactactcctaccccctgacattcggcgccggcaccaaactggagctgaagggtggcggtggctcgggcggtggtgggtcgggtggcggcggatctcaggtgcagctccagcagtccgatgccgagctggtgaagcccggaagcagcgtcaagatcagctgtaaggcctccggctacaccttcacagaccacgccatccactgggtgaagcagaagcccgagcagggcctggagtggatcggccactttagccccggaaacaccgacatcaagtacaacgacaagttcaagggcaaggccaccctgaccgtggacaggagcagcagcaccgcctacatgcagctgaacagcctgacaagcgaggacagcgccgtgtacttctgcaagacctccaccttcttcttcgactactggggccagggaaccaccctgacagtgtccagcaccacgacgccagcgccgcgaccaccaacaccggcgcccaccatcgcgtcgcagcccctgtccctgcgcccagaggcgtgccggccagcggcggggggcgcagtgcacacgagggggctggacttcgcctgtgatatctacatctgggcgcccttggccgggacttgtggggtccttctcctgtcactggttatcaccctttactgcaaacggggcagaaagaaactcctgtatatattcaaacaaccatttatgagaccagtacaaactactcaagaggaagatggctgtagctgccgatttccagaagaagaagaaggaggatgtgaactgagagtgaagttcagcaggagcgcagacgcccccgcgtacaagcagggccagaaccagctctataacgagctcaatctaggacgaagagaggagtacgatgttttggacaagaggcgtggccgggaccctgagatggggggaaagccgagaaggaagaaccctcaggaaggcctgtacaatgaactgcagaaagataagatggcggaggcctacagtgagattgggatgaaaggcgagcgccggaggggcaaggggcacgatggcctttaccagggtctcagtacagccaccaaggacacctacgacgcccttcacatgcaggccctgccccctcgctaatctagaggcgcgcccctctccctcccccccccctaacgttactggccgaagccgcttggaataaggccggtgtgcgtttgtctatatgttattttccaccatattgccgtcttttggcaatgtgagggcccggaaacctggccctgtcttcttgacgagcattcctaggggtctttcccctctcgccaaaggaatgcaaggtctgttgaatgtcgtgaaggaagcagttcctctggaagcttcttgaagacaaacaacgtctgtagcgaccctttgcaggcagcggaaccccccacctggcgacaggtgcctctgcggccaaaagccacgtgtataagatacacctgcaaaggcggcacaaccccagtgccacgttgtgagttggatagttgtggaaagagtcaaatggctctcctcaagcgtattcaacaaggggctgaaggatgcccagaaggtaccccattgtatgggatctgatctggggcctcggtacacatgctttacatgtgtttagtcgaggttaaaaaaacgtctaggccccccgaaccacggggacgtggttttcctttgaaaaacacgatgataatatggccacaacccatatgatggccttaccagtgaccgccttgctcctgccgctggccttgctgctccacgccgccaggccggagatcgtgatgacccagtcccccctgtccctgcccgtgacccccggcgagcccgcctccatctcctgccggtcctcccagtccctgctgcactccaacggctacaactacctggactggtacctgcagaagcccggccagtccccccagctgctgatctacctgggctccaaccgggcctccggcgtgcccgaccggttctccggctccggctccggcaccgacttcaccctgaagatctcccgggtggaggccgaggacgtgggcgtgtactactgcatgcaggccctgcagacccccaccttcggccccggcaccaaggtggacatcaagggcggcggcggctccggcggcggcggctccggcggcggcggctcccaggtgcagctggtgcagtccggcggcggcgtggtgcagcccggcaagtccctgcggctgtcctgcgccgcctccggcttcaccttctccatcttcgccatgcactgggtgcggcaggcccccggcaagggcctggagtgggtggccaccatctcctacgacggctccaacgccttctacgccgactccgtggagggccggttcaccatctcccgggacaactccaaggactccctgtacctgcagatggactccctgcggcccgaggacaccgccgtgtactactgcgtgaaggccggcgacggcggctacgacgtgttcgactcctggggccagggcaccctggtgaccgtgtcctccaccacgacgccagcgccgcgaccaccaacaccggcgcccaccatcgcgtcgcagcccctgtccctgcgcccagaggcgtgccggccagcggcggggggcgcagtgcacacgagggggctggacttcgcctgtgatatctacatctgggcgcccttggccgggacttgtggggtccttctcctgtcactggttatcaccctttactgcaaacggggcagaaagaaactcctgtatatattcaaacaaccatttatgagaccagtacaaactactcaagaggaagatggctgtagctgccgatttccagaagaagaagaaggaggatgtgaactgagagtgaagttcagcaggagcgcagacgcccccgcgtacaagcagggccagaaccagctctataacgagctcaatctaggacgaagagaggagtacgatgttttggacaagaggcgtggccgggaccctgagatggggggaaagccgagaaggaagaaccctcaggaaggcctgtacaatgaactgcagaaagataagatggcggaggcctacagtgagattgggatgaaaggcgagcgccggaggggcaaggggcacgatggcctttaccagggtctcagtacagccaccaaggacacctacgacgcccttcacatgcaggccctgccccctcgctaa

SEQ ID NO: 261 - DNA, 3536 bp, Artificial Sequence
  Synthesized
atggccttaccagtgaccgccttgctcctgccgctggccttgctgctccacgccgccaggccggacatcgtgatgacccagtccccctccagcctgacagtgacagccggcgagaaggtgacaatgatctgtaagtccagccagagcctgctgaacagcggcgaccagaagaactacctgacctggtaccagcagaagcctggccagccccccaagctgctgatcttctgggccagcacaagggagagcggcgtgcccgacagattcacaggcagcggcagcggcaccgacttcacactgaccatttcctccgtgcaggccgaggacctcgccgtgtactactgccagaacgactactcctaccccctgacattcggcgccggcaccaaactggagctgaagggtggcggtggctcgggcggtggtgggtcgggtggcggcggatctcaggtgcagctccagcagtccgatgccgagctggtgaagcccggaagcagcgtcaagatcagctgtaaggcctccggctacaccttcacagaccacgccatccactgggtgaagcagaagcccgagcagggcctggagtggatcggccactttagccccggaaacaccgacatcaagtacaacgacaagttcaagggcaaggccaccctgaccgtggacaggagcagcagcaccgcctacatgcagctgaacagcctgacaagcgaggacagcgccgtgtacttctgcaagacctccaccttcttcttcgactactggggccagggaaccaccctgacagtgtccagcaccacgacgccagcgccgcgaccaccaacaccggcgcccaccatcgcgtcgcagcccctgtccctgcgcccagaggcgtgccggccagcggcggggggcgcagtgcacacgagggggctggacttcgcctgtgatatctacatctgggcgcccttggccgggacttgtggggtccttctcctgtcactggttatcaccaaacggggcagaaagaaactcctgtatatattcaaacaaccatttatgagaccagtacaaactactcaagaggaagatggctgtagctgccgatttccagaagaagaagaaggaggatgtgaactgagagtgaagttcagcaggagcgcagacgcccccgcgtacaagcagggccagaaccagctctataacgagctcaatctaggacgaagagaggagtacgatgttttggacaagaggcgtggccgggaccctgagatggggggaaagccgagaaggaagaaccctcaggaaggcctgtacaatgaactgcagaaagataagatggcggaggcctacagtgagattgggatgaaaggcgagcgccggaggggcaaggggcacgatggcctttaccagggtctcagtacagccaccaaggacacctacgacgcccttcacatgcaggccctgccccctcgctaatctagaggcgcgcccctctccctcccccccccctaacgttactggccgaagccgcttggaataaggccggtgtgcgtttgtctatatgttattttccaccatattgccgtcttttggcaatgtgagggcccggaaacctggccctgtcttcttgacgagcattcctaggggtctttcccctctcgccaaaggaatgcaaggtctgttgaatgtcgtgaaggaagcagttcctctggaagcttcttgaagacaaacaacgtctgtagcgaccctttgcaggcagcggaaccccccacctggcgacaggtgcctctgcggccaaaagccacgtgtataagatacacctgcaaaggcggcacaaccccagtgccacgttgtgagttggatagttgtggaaagagtcaaatggctctcctcaagcgtattcaacaaggggctgaaggatgcccagaaggtaccccattgtatgggatctgatctggggcctcggtacacatgctttacatgtgtttagtcgaggttaaaaaaacgtctaggccccccgaaccacggggacgtggttttcctttgaaaaacacgatgataatatggccacaacccatatgatggccttaccagtgaccgccttgctcctgccgctggccttgctgctccacgccgccaggccggagatcgtgatgacccagtcccccctgtccctgcccgtgacccccggcgagcccgcctccatctcctgccggtcctcccagtccctgctgcactccaacggctacaactacctggactggtacctgcagaagcccggccagtccccccagctgctgatctacctgggctccaaccgggcctccggcgtgcccgaccggttctccggctccggctccggcaccgacttcaccctgaagatctcccgggtggaggccgaggacgtgggcgtgtactactgcatgcaggccctgcagacccccaccttcggccccggcaccaaggtggacatcaagggcggcggcggctccggcggcggcggctccggcggcggcggctcccaggtgcagctggtgcagtccggcggcggcgtggtgcagcccggcaagtccctgcggctgtcctgcgccgcctccggcttcaccttctccatcttcgccatgcactgggtgcggcaggcccccggcaagggcctggagtgggtggccaccatctcctacgacggctccaacgccttctacgccgactccgtggagggccggttcaccatctcccgggacaactccaaggactccctgtacctgcagatggactccctgcggcccgaggacaccgccgtgtactactgcgtgaaggccggcgacggcggctacgacgtgttcgactcctggggccagggcaccctggtgaccgtgtcctccaccacgacgccagcgccgcgaccaccaacaccggcgcccaccatcgcgtcgcagcccctgtccctgcgcccagaggcgtgccggccagcggcggggggcgcagtgcacacgagggggctggacttcgcctgtgatatctacatctgggcgcccttggccgggacttgtggggtccttctcctgtcactggttatcaccctttactgcaaacggggcagaaagaaactcctgtatatattcaaacaaccatttatgagaccagtacaaactactcaagaggaagatggctgtagctgccgatttccagaagaagaagaaggaggatgtgaactgagagtgaagttcagcaggagcgcagacgcccccgcgtacaagcagggccagaaccagctctataacgagctcaatctaggacgaagagaggagtacgatgttttggacaagaggcgtggccgggaccctgagatggggggaaagccgagaaggaagaaccctcaggaaggcctgtacaatgaactgcagaaagataagatggcggaggcctacagtgagattgggatgaaaggcgagcgccggaggggcaaggggcacgatggcctttaccagggtctcagtacagccaccaaggacacctacgacgcccttcacatgcaggccctgccccctcgctaa

SEQ ID NO: 262 - DNA, 3536 bp, Artificial Sequence
  Synthesized
atggccttaccagtgaccgccttgctcctgccgctggccttgctgctccacgccgccaggccggacatcgtgatgacccagtccccctccagcctgacagtgacagccggcgagaaggtgacaatgatctgtaagtccagccagagcctgctgaacagcggcgaccagaagaactacctgacctggtaccagcagaagcctggccagccccccaagctgctgatcttctgggccagcacaagggagagcggcgtgcccgacagattcacaggcagcggcagcggcaccgacttcacactgaccatttcctccgtgcaggccgaggacctcgccgtgtactactgccagaacgactactcctaccccctgacattcggcgccggcaccaaactggagctgaagggtggcggtggctcgggcggtggtgggtcgggtggcggcggatctcaggtgcagctccagcagtccgatgccgagctggtgaagcccggaagcagcgtcaagatcagctgtaaggcctccggctacaccttcacagaccacgccatccactgggtgaagcagaagcccgagcagggcctggagtggatcggccactttagccccggaaacaccgacatcaagtacaacgacaagttcaagggcaaggccaccctgaccgtggacaggagcagcagcaccgcctacatgcagctgaacagcctgacaagcgaggacagcgccgtgtacttctgcaagacctccaccttcttcttcgactactggggccagggaaccaccctgacagtgtccagcaccacgacgccagcgccgcgaccaccaacaccggcgcccaccatcgcgtcgcagcccctgtccctgcgcccagaggcgtgccggccagcggcggggggcgcagtgcacacgagggggctggacttcgcctgtgatatctacatctgggcgcccttggccgggacttgtggggtccttctcctgtcactggttatcaccctttactgcaaacggggcagaaagaaactcctgtatatattcaaacaaccatttatgagaccagtacaaactactcaagaggaagatggctgtagctgccgatttccagaagaagaagaaggaggatgtgaactgagagtgaagttcagcaggagcgcagacgcccccgcgtacaagcagggccagaaccagctctataacgagctcaatctaggacgaagagaggagtacgatgttttggacaagaggcgtggccgggaccctgagatggggggaaagccgagaaggaagaaccctcaggaaggcctgtacaatgaactgcagaaagataagatggcggaggcctacagtgagattgggatgaaaggcgagcgccggaggggcaaggggcacgatggcctttaccagggtctcagtacagccaccaaggacacctacgacgcccttcacatgcaggccctgccccctcgctaatctagaggcgcgcccctctccctcccccccccctaacgttactggccgaagccgcttggaataaggccggtgtgcgtttgtctatatgttattttccaccatattgccgtcttttggcaatgtgagggcccggaaacctggccctgtcttcttgacgagcattcctaggggtctttcccctctcgccaaaggaatgcaaggtctgttgaatgtcgtgaaggaagcagttcctctggaagcttcttgaagacaaacaacgtctgtagcgaccctttgcaggcagcggaaccccccacctggcgacaggtgcctctgcggccaaaagccacgtgtataagatacacctgcaaaggcggcacaaccccagtgccacgttgtgagttggatagttgtggaaagagtcaaatggctctcctcaagcgtattcaacaaggggctgaaggatgcccagaaggtaccccattgtatgggatctgatctggggcctcggtacacatgctttacatgtgtttagtcgaggttaaaaaaacgtctaggccccccgaaccacggggacgtggttttcctttgaaaaacacgatgataatatggccacaacccatatgatggccttaccagtgaccgccttgctcctgccgctggccttgctgctccacgccgccaggccggagatcgtgatgacccagtcccccctgtccctgcccgtgacccccggcgagcccgcctccatctcctgccggtcctcccagtccctgctgcactccaacggctacaactacctggactggtacctgcagaagcccggccagtccccccagctgctgatctacctgggctccaaccgggcctccggcgtgcccgaccggttctccggctccggctccggcaccgacttcaccctgaagatctcccgggtggaggccgaggacgtgggcgtgtactactgcatgcaggccctgcagacccccaccttcggccccggcaccaaggtggacatcaagggcggcggcggctccggcggcggcggctccggcggcggcggctcccaggtgcagctggtgcagtccggcggcggcgtggtgcagcccggcaagtccctgcggctgtcctgcgccgcctccggcttcaccttctccatcttcgccatgcactgggtgcggcaggcccccggcaagggcctggagtgggtggccaccatctcctacgacggctccaacgccttctacgccgactccgtggagggccggttcaccatctcccgggacaactccaaggactccctgtacctgcagatggactccctgcggcccgaggacaccgccgtgtactactgcgtgaaggccggcgacggcggctacgacgtgttcgactcctggggccagggcaccctggtgaccgtgtcctccaccacgacgccagcgccgcgaccaccaacaccggcgcccaccatcgcgtcgcagcccctgtccctgcgcccagaggcgtgccggccagcggcggggggcgcagtgcacacgagggggctggacttcgcctgtgatatctacatctgggcgcccttggccgggacttgtggggtccttctcctgtcactggttatcaccaaacggggcagaaagaaactcctgtatatattcaaacaaccatttatgagaccagtacaaactactcaagaggaagatggctgtagctgccgatttccagaagaagaagaaggaggatgtgaactgagagtgaagttcagcaggagcgcagacgcccccgcgtacaagcagggccagaaccagctctataacgagctcaatctaggacgaagagaggagtacgatgttttggacaagaggcgtggccgggaccctgagatggggggaaagccgagaaggaagaaccctcaggaaggcctgtacaatgaactgcagaaagataagatggcggaggcctacagtgagattgggatgaaaggcgagcgccggaggggcaaggggcacgatggcctttaccagggtctcagtacagccaccaaggacacctacgacgcccttcacatgcaggccctgccccctcgctaa

SEQ ID NO: 263 - DNA, 3527 bp, Artificial Sequence
  Synthesized
atggccttaccagtgaccgccttgctcctgccgctggccttgctgctccacgccgccaggccggacatcgtgatgacccagtccccctccagcctgacagtgacagccggcgagaaggtgacaatgatctgtaagtccagccagagcctgctgaacagcggcgaccagaagaactacctgacctggtaccagcagaagcctggccagccccccaagctgctgatcttctgggccagcacaagggagagcggcgtgcccgacagattcacaggcagcggcagcggcaccgacttcacactgaccatttcctccgtgcaggccgaggacctcgccgtgtactactgccagaacgactactcctaccccctgacattcggcgccggcaccaaactggagctgaagggtggcggtggctcgggcggtggtgggtcgggtggcggcggatctcaggtgcagctccagcagtccgatgccgagctggtgaagcccggaagcagcgtcaagatcagctgtaaggcctccggctacaccttcacagaccacgccatccactgggtgaagcagaagcccgagcagggcctggagtggatcggccactttagccccggaaacaccgacatcaagtacaacgacaagttcaagggcaaggccaccctgaccgtggacaggagcagcagcaccgcctacatgcagctgaacagcctgacaagcgaggacagcgccgtgtacttctgcaagacctccaccttcttcttcgactactggggccagggaaccaccctgacagtgtccagcaccacgacgccagcgccgcgaccaccaacaccggcgcccaccatcgcgtcgcagcccctgtccctgcgcccagaggcgtgccggccagcggcggggggcgcagtgcacacgagggggctggacttcgcctgtgatatctacatctgggcgcccttggccgggacttgtggggtccttctcctgtcactggttatcaccaaacggggcagaaagaaactcctgtatatattcaaacaaccatttatgagaccagtacaaactactcaagaggaagatggctgtagctgccgatttccagaagaagaagaaggaggatgtgaactgagagtgaagttcagcaggagcgcagacgcccccgcgtacaagcagggccagaaccagctctataacgagctcaatctaggacgaagagaggagtacgatgttttggacaagaggcgtggccgggaccctgagatggggggaaagccgagaaggaagaaccctcaggaaggcctgtacaatgaactgcagaaagataagatggcggaggcctacagtgagattgggatgaaaggcgagcgccggaggggcaaggggcacgatggcctttaccagggtctcagtacagccaccaaggacacctacgacgcccttcacatgcaggccctgccccctcgctaatctagaggcgcgcccctctccctcccccccccctaacgttactggccgaagccgcttggaataaggccggtgtgcgtttgtctatatgttattttccaccatattgccgtcttttggcaatgtgagggcccggaaacctggccctgtcttcttgacgagcattcctaggggtctttcccctctcgccaaaggaatgcaaggtctgttgaatgtcgtgaaggaagcagttcctctggaagcttcttgaagacaaacaacgtctgtagcgaccctttgcaggcagcggaaccccccacctggcgacaggtgcctctgcggccaaaagccacgtgtataagatacacctgcaaaggcggcacaaccccagtgccacgttgtgagttggatagttgtggaaagagtcaaatggctctcctcaagcgtattcaacaaggggctgaaggatgcccagaaggtaccccattgtatgggatctgatctggggcctcggtacacatgctttacatgtgtttagtcgaggttaaaaaaacgtctaggccccccgaaccacggggacgtggttttcctttgaaaaacacgatgataatatggccacaacccatatgatggccttaccagtgaccgccttgctcctgccgctggccttgctgctccacgccgccaggccggagatcgtgatgacccagtcccccctgtccctgcccgtgacccccggcgagcccgcctccatctcctgccggtcctcccagtccctgctgcactccaacggctacaactacctggactggtacctgcagaagcccggccagtccccccagctgctgatctacctgggctccaaccgggcctccggcgtgcccgaccggttctccggctccggctccggcaccgacttcaccctgaagatctcccgggtggaggccgaggacgtgggcgtgtactactgcatgcaggccctgcagacccccaccttcggccccggcaccaaggtggacatcaagggcggcggcggctccggcggcggcggctccggcggcggcggctcccaggtgcagctggtgcagtccggcggcggcgtggtgcagcccggcaagtccctgcggctgtcctgcgccgcctccggcttcaccttctccatcttcgccatgcactgggtgcggcaggcccccggcaagggcctggagtgggtggccaccatctcctacgacggctccaacgccttctacgccgactccgtggagggccggttcaccatctcccgggacaactccaaggactccctgtacctgcagatggactccctgcggcccgaggacaccgccgtgtactactgcgtgaaggccggcgacggcggctacgacgtgttcgactcctggggccagggcaccctggtgaccgtgtcctccaccacgacgccagcgccgcgaccaccaacaccggcgcccaccatcgcgtcgcagcccctgtccctgcgcccagaggcgtgccggccagcggcggggggcgcagtgcacacgagggggctggacttcgcctgtgatatctacatctgggcgcccttggccgggacttgtggggtccttctcctgtcactggttatcaccaaacggggcagaaagaaactcctgtatatattcaaacaaccatttatgagaccagtacaaactactcaagaggaagatggctgtagctgccgatttccagaagaagaagaaggaggatgtgaactgagagtgaagttcagcaggagcgcagacgcccccgcgtacaagcagggccagaaccagctctataacgagctcaatctaggacgaagagaggagtacgatgttttggacaagaggcgtggccgggaccctgagatggggggaaagccgagaaggaagaaccctcaggaaggcctgtacaatgaactgcagaaagataagatggcggaggcctacagtgagattgggatgaaaggcgagcgccggaggggcaaggggcacgatggcctttaccagggtctcagtacagccaccaaggacacctacgacgcccttcacatgcaggccctgccccctcgctaa

SEQ ID NO: 264 - protein, 505 aa, Artificial Sequence
  Synthezied
DIVMTQSPSSLTVTAGEKVTMICKSSQSLLNSGDQKNYLTWYQQKPGQPPKLLIFWASTRESGVPDRFTGSGSGTDFTLTISSVQAEDLAVYYCQNDYSYPLTFGAGTKLELKGGGGSGGGGSGGGGSQVQLQQSDAELVKPGSSVKISCKASGYTFTDHAIHWVKQKPEQGLEWIGHFSPGNTDIKYNDKFKGKATLTVDRSSSTAYMQLNSLTSEDSAVYFCKTSTFFFDYWGQGTTLTVSSGGGGSGGGGSGGGGSDIVMTQAAFSNPVTLGTSASISCRSSKSLLHSNGITYFFWYLQKPGLSPQLLIYQMSNLASGVPDRFSSSGSGTDFTLRISRVEAEDVGVYYCAQNLELPPTFGGGTKLEIKRAGGGGSGGGGSGGGGSEVKLVESGGGLVQPGGSMKLSCVASGFTFSNYWMNWVRQSPEKGLEWVAEIRLKSNNYTTHYAESVKGRFTISRDDSKSSVSLQMNNLRVEDTGIYYCTRHYYFDYWGQGTTLTVSS

SEQ ID NO: 265 - protein, 505 aa, Artificial Sequence
  Synthesized
DIVMTQAAFSNPVTLGTSASISCRSSKSLLHSNGITYFFWYLQKPGLSPQLLIYQMSNLASGVPDRFSSSGSGTDFTLRISRVEAEDVGVYYCAQNLELPPTFGGGTKLEIKRAGGGGSGGGGSGGGGSEVKLVESGGGLVQPGGSMKLSCVASGFTFSNYWMNWVRQSPEKGLEWVAEIRLKSNNYTTHYAESVKGRFTISRDDSKSSVSLQMNNLRVEDTGIYYCTRHYYFDYWGQGTTLTVSSGGGGSGGGGSGGGGSDIVMTQSPSSLTVTAGEKVTMICKSSQSLLNSGDQKNYLTWYQQKPGQPPKLLIFWASTRESGVPDRFTGSGSGTDFTLTISSVQAEDLAVYYCQNDYSYPLTFGAGTKLELKGGGGSGGGGSGGGGSQVQLQQSDAELVKPGSSVKISCKASGYTFTDHAIHWVKQKPEQGLEWIGHFSPGNTDIKYNDKFKGKATLTVDRSSSTAYMQLNSLTSEDSAVYFCKTSTFFFDYWGQGTTLTVSS

SEQ ID NO: 266 - protein, 69 aa, Artificial Sequence; identical to SEQ ID NO: 30
  Synthesized

SEQ ID NO: 267 - protein, 66 aa, Artificial Sequence; identical to SEQ ID NO: 29
  Synthesized

SEQ ID NO: 268 - protein, 69 aa, Artificial Sequence; identical to SEQ ID NO: 2
  Synthesized

SEQ ID NO: 269 - protein, 72 aa, Artificial Sequence; identical to SEQ ID NO: 31
  Synthezied

SEQ ID NO: 270 - protein, 728 aa, Artificial Sequence
  Synthesized
DIVMTQSPSSLTVTAGEKVTMICKSSQSLLNSGDQKNYLTWYQQKPGQPPKLLIFWASTRESGVPDRFTGSGSGTDFTLTISSVQAEDLAVYYCQNDYSYPLTFGAGTKLELKGGGGSGGGGSGGGGSQVQLQQSDAELVKPGSSVKISCKASGYTFTDHAIHWVKQKPEQGLEWIGHFSPGNTDIKYNDKFKGKATLTVDRSSSTAYMQLNSLTSEDSAVYFCKTSTFFFDYWGQGTTLTVSSGGGGSGGGGSGGGGSDIVMTQAAFSNPVTLGTSASISCRSSKSLLHSNGITYFFWYLQKPGLSPQLLIYQMSNLASGVPDRFSSSGSGTDFTLRISRVEAEDVGVYYCAQNLELPPTFGGGTKLEIKRAGGGGSGGGGSGGGGSEVKLVESGGGLVQPGGSMKLSCVASGFTFSNYWMNWVRQSPEKGLEWVAEIRLKSNNYTTHYAESVKGRFTISRDDSKSSVSLQMNNLRVEDTGIYYCTRHYYFDYWGQGTTLTVSSTTTPAPRPPTPAPTIASQPLSLRPEACRPAAGGAVHTRGLDFACDIYIWAPLAGTCGVLLLSLVITLYCKRGRKKLLYIFKQPFMRPVQTTQEEDGCSCRFPEEEEGGCELRVKFSRSADAPAYQQGQNQLYNELNLGRREEYDVLDKRRGRDPEMGGKPRRKNPQEGLYNELQKDKMAEAYSEIGMKGERRRGKGHDGLYQGLSTATKDTYDALHMQALPPR

SEQ ID NO: 271 - protein, 725 aa, Artificial Sequence
  Synthesized
DIVMTQSPSSLTVTAGEKVTMICKSSQSLLNSGDQKNYLTWYQQKPGQPPKLLIFWASTRESGVPDRFTGSGSGTDFTLTISSVQAEDLAVYYCQNDYSYPLTFGAGTKLELKGGGGSGGGGSGGGGSQVQLQQSDAELVKPGSSVKISCKASGYTFTDHAIHWVKQKPEQGLEWIGHFSPGNTDIKYNDKFKGKATLTVDRSSSTAYMQLNSLTSEDSAVYFCKTSTFFFDYWGQGTTLTVSSGGGGSGGGGSGGGGSDIVMTQAAFSNPVTLGTSASISCRSSKSLLHSNGITYFFWYLQKPGLSPQLLIYQMSNLASGVPDRFSSSGSGTDFTLRISRVEAEDVGVYYCAQNLELPPTFGGGTKLEIKRAGGGGSGGGGSGGGGSEVKLVESGGGLVQPGGSMKLSCVASGFTFSNYWMNWVRQSPEKGLEWVAEIRLKSNNYTTHYAESVKGRFTISRDDSKSSVSLQMNNLRVEDTGIYYCTRHYYFDYWGQGTTLTVSSTTTPAPRPPTPAPTIASQPLSLRPEACRPAAGGAVHTRGLDFACDIYIWAPLAGTCGVLLLSLVITKRGRKKLLYIFKQPFMRPVQTTQEEDGCSCRFPEEEEGGCELRVKFSRSADAPAYQQGQNQLYNELNLGRREEYDVLDKRRGRDPEMGGKPRRKNPQEGLYNELQKDKMAEAYSEIGMKGERRRGKGHDGLYQGLSTATKDTYDALHMQALPPR

SEQ ID NO: 272 - protein, 728 aa, Artificial Sequence
  Synthesized
DIVMTQSPSSLTVTAGEKVTMICKSSQSLLNSGDQKNYLTWYQQKPGQPPKLLIFWASTRESGVPDRFTGSGSGTDFTLTISSVQAEDLAVYYCQNDYSYPLTFGAGTKLELKGGGGSGGGGSGGGGSQVQLQQSDAELVKPGSSVKISCKASGYTFTDHAIHWVKQKPEQGLEWIGHFSPGNTDIKYNDKFKGKATLTVDRSSSTAYMQLNSLTSEDSAVYFCKTSTFFFDYWGQGTTLTVSSGGGGSGGGGSGGGGSDIVMTQAAFSNPVTLGTSASISCRSSKSLLHSNGITYFFWYLQKPGLSPQLLIYQMSNLASGVPDRFSSSGSGTDFTLRISRVEAEDVGVYYCAQNLELPPTFGGGTKLEIKRAGGGGSGGGGSGGGGSEVKLVESGGGLVQPGGSMKLSCVASGFTFSNYWMNWVRQSPEKGLEWVAEIRLKSNNYTTHYAESVKGRFTISRDDSKSSVSLQMNNLRVEDTGIYYCTRHYYFDYWGQGTTLTVSSAKPTTTPAPRPPTPAPTIASQPLSLRPEACRPAAGGAVHTRGLDFACDIYIWAPLAGTCGVLLLSLVITKRGRKKLLYIFKQPFMRPVQTTQEEDGCSCRFPEEEEGGCELRVKFSRSADAPAYQQGQNQLYNELNLGRREEYDVLDKRRGRDPEMGGKPRRKNPQEGLYNELQKDKMAEAYSEIGMKGERRRGKGHDGLYQGLSTATKDTYDALHMQALPPR

SEQ ID NO: 273 - protein, 731 aa, Artificial Sequence
  Synthezied
DIVMTQSPSSLTVTAGEKVTMICKSSQSLLNSGDQKNYLTWYQQKPGQPPKLLIFWASTRESGVPDRFTGSGSGTDFTLTISSVQAEDLAVYYCQNDYSYPLTFGAGTKLELKGGGGSGGGGSGGGGSQVQLQQSDAELVKPGSSVKISCKASGYTFTDHAIHWVKQKPEQGLEWIGHFSPGNTDIKYNDKFKGKATLTVDRSSSTAYMQLNSLTSEDSAVYFCKTSTFFFDYWGQGTTLTVSSGGGGSGGGGSGGGGSDIVMTQAAFSNPVTLGTSASISCRSSKSLLHSNGITYFFWYLQKPGLSPQLLIYQMSNLASGVPDRFSSSGSGTDFTLRISRVEAEDVGVYYCAQNLELPPTFGGGTKLEIKRAGGGGSGGGGSGGGGSEVKLVESGGGLVQPGGSMKLSCVASGFTFSNYWMNWVRQSPEKGLEWVAEIRLKSNNYTTHYAESVKGRFTISRDDSKSSVSLQMNNLRVEDTGIYYCTRHYYFDYWGQGTTLTVSSAKPTTTPAPRPPTPAPTIASQPLSLRPEACRPAAGGAVHTRGLDFACDIYIWAPLAGTCGVLLLSLVITLYCKRGRKKLLYIFKQPFMRPVQTTQEEDGCSCRFPEEEEGGCELRVKFSRSADAPAYQQGQNQLYNELNLGRREEYDVLDKRRGRDPEMGGKPRRKNPQEGLYNELQKDKMAEAYSEIGMKGERRRGKGHDGLYQGLSTATKDTYDALHMQALPPR

SEQ ID NO: 274 - protein, 728 aa, Artificial Sequence
  Synthezied
DIVMTQAAFSNPVTLGTSASISCRSSKSLLHSNGITYFFWYLQKPGLSPQLLIYQMSNLASGVPDRFSSSGSGTDFTLRISRVEAEDVGVYYCAQNLELPPTFGGGTKLEIKRAGGGGSGGGGSGGGGSEVKLVESGGGLVQPGGSMKLSCVASGFTFSNYWMNWVRQSPEKGLEWVAEIRLKSNNYTTHYAESVKGRFTISRDDSKSSVSLQMNNLRVEDTGIYYCTRHYYFDYWGQGTTLTVSSGGGGSGGGGSGGGGSDIVMTQSPSSLTVTAGEKVTMICKSSQSLLNSGDQKNYLTWYQQKPGQPPKLLIFWASTRESGVPDRFTGSGSGTDFTLTISSVQAEDLAVYYCQNDYSYPLTFGAGTKLELKGGGGSGGGGSGGGGSQVQLQQSDAELVKPGSSVKISCKASGYTFTDHAIHWVKQKPEQGLEWIGHFSPGNTDIKYNDKFKGKATLTVDRSSSTAYMQLNSLTSEDSAVYFCKTSTFFFDYWGQGTTLTVSSTTTPAPRPPTPAPTIASQPLSLRPEACRPAAGGAVHTRGLDFACDIYIWAPLAGTCGVLLLSLVITLYCKRGRKKLLYIFKQPFMRPVQTTQEEDGCSCRFPEEEEGGCELRVKFSRSADAPAYQQGQNQLYNELNLGRREEYDVLDKRRGRDPEMGGKPRRKNPQEGLYNELQKDKMAEAYSEIGMKGERRRGKGHDGLYQGLSTATKDTYDALHMQALPPR

SEQ ID NO: 275 - protein, 725 aa, Artificial Sequence
  Synthezied
DIVMTQAAFSNPVTLGTSASISCRSSKSLLHSNGITYFFWYLQKPGLSPQLLIYQMSNLASGVPDRFSSSGSGTDFTLRISRVEAEDVGVYYCAQNLELPPTFGGGTKLEIKRAGGGGSGGGGSGGGGSEVKLVESGGGLVQPGGSMKLSCVASGFTFSNYWMNWVRQSPEKGLEWVAEIRLKSNNYTTHYAESVKGRFTISRDDSKSSVSLQMNNLRVEDTGIYYCTRHYYFDYWGQGTTLTVSSGGGGSGGGGSGGGGSDIVMTQSPSSLTVTAGEKVTMICKSSQSLLNSGDQKNYLTWYQQKPGQPPKLLIFWASTRESGVPDRFTGSGSGTDFTLTISSVQAEDLAVYYCQNDYSYPLTFGAGTKLELKGGGGSGGGGSGGGGSQVQLQQSDAELVKPGSSVKISCKASGYTFTDHAIHWVKQKPEQGLEWIGHFSPGNTDIKYNDKFKGKATLTVDRSSSTAYMQLNSLTSEDSAVYFCKTSTFFFDYWGQGTTLTVSSTTTPAPRPPTPAPTIASQPLSLRPEACRPAAGGAVHTRGLDFACDIYIWAPLAGTCGVLLLSLVITKRGRKKLLYIFKQPFMRPVQTTQEEDGCSCRFPEEEEGGCELRVKFSRSADAPAYQQGQNQLYNELNLGRREEYDVLDKRRGRDPEMGGKPRRKNPQEGLYNELQKDKMAEAYSEIGMKGERRRGKGHDGLYQGLSTATKDTYDALHMQALPPR

SEQ ID NO: 276 - protein, 728 aa, Artificial Sequence
  Synthezied
DIVMTQAAFSNPVTLGTSASISCRSSKSLLHSNGITYFFWYLQKPGLSPQLLIYQMSNLASGVPDRFSSSGSGTDFTLRISRVEAEDVGVYYCAQNLELPPTFGGGTKLEIKRAGGGGSGGGGSGGGGSEVKLVESGGGLVQPGGSMKLSCVASGFTFSNYWMNWVRQSPEKGLEWVAEIRLKSNNYTTHYAESVKGRFTISRDDSKSSVSLQMNNLRVEDTGIYYCTRHYYFDYWGQGTTLTVSSGGGGSGGGGSGGGGSDIVMTQSPSSLTVTAGEKVTMICKSSQSLLNSGDQKNYLTWYQQKPGQPPKLLIFWASTRESGVPDRFTGSGSGTDFTLTISSVQAEDLAVYYCQNDYSYPLTFGAGTKLELKGGGGSGGGGSGGGGSQVQLQQSDAELVKPGSSVKISCKASGYTFTDHAIHWVKQKPEQGLEWIGHFSPGNTDIKYNDKFKGKATLTVDRSSSTAYMQLNSLTSEDSAVYFCKTSTFFFDYWGQGTTLTVSSAKPTTTPAPRPPTPAPTIASQPLSLRPEACRPAAGGAVHTRGLDFACDIYIWAPLAGTCGVLLLSLVITKRGRKKLLYIFKQPFMRPVQTTQEEDGCSCRFPEEEEGGCELRVKFSRSADAPAYQQGQNQLYNELNLGRREEYDVLDKRRGRDPEMGGKPRRKNPQEGLYNELQKDKMAEAYSEIGMKGERRRGKGHDGLYQGLSTATKDTYDALHMQALPPR

SEQ ID NO: 277 - protein, 731 aa, Artificial Sequence
  Synthesized
DIVMTQAAFSNPVTLGTSASISCRSSKSLLHSNGITYFFWYLQKPGLSPQLLIYQMSNLASGVPDRFSSSGSGTDFTLRISRVEAEDVGVYYCAQNLELPPTFGGGTKLEIKRAGGGGSGGGGSGGGGSEVKLVESGGGLVQPGGSMKLSCVASGFTFSNYWMNWVRQSPEKGLEWVAEIRLKSNNYTTHYAESVKGRFTISRDDSKSSVSLQMNNLRVEDTGIYYCTRHYYFDYWGQGTTLTVSSGGGGSGGGGSGGGGSDIVMTQSPSSLTVTAGEKVTMICKSSQSLLNSGDQKNYLTWYQQKPGQPPKLLIFWASTRESGVPDRFTGSGSGTDFTLTISSVQAEDLAVYYCQNDYSYPLTFGAGTKLELKGGGGSGGGGSGGGGSQVQLQQSDAELVKPGSSVKISCKASGYTFTDHAIHWVKQKPEQGLEWIGHFSPGNTDIKYNDKFKGKATLTVDRSSSTAYMQLNSLTSEDSAVYFCKTSTFFFDYWGQGTTLTVSSAKPTTTPAPRPPTPAPTIASQPLSLRPEACRPAAGGAVHTRGLDFACDIYIWAPLAGTCGVLLLSLVITLYCKRGRKKLLYIFKQPFMRPVQTTQEEDGCSCRFPEEEEGGCELRVKFSRSADAPAYQQGQNQLYNELNLGRREEYDVLDKRRGRDPEMGGKPRRKNPQEGLYNELQKDKMAEAYSEIGMKGERRRGKGHDGLYQGLSTATKDTYDALHMQALPPR

SEQ ID NO: 278 - protein, 5 aa, Artificial Sequence
  Synthesized
GGGGS

SEQ ID NO: 279 - DNA, 1470 bp, Artificial Sequence
  Synthesized
atggccttaccagtgaccgccttgctcctgccgctggccttgctgctccacgccgccaggccgcagtccgtgctgacccagccaccttccgtgtctgccgctccaggccagaaggtgacaatcagctgctccggcagctcctctgacatcggaagcaactacgtgtcctggtaccagcagttcccaggcaccgcccccaagctgctgatctacgacaacaacaagaggcctagcgccatcccagatagattttctggcagcaagtccggaacctccgccacactgggcatcaccggactgcagacaggcgacgaggctgattactactgcggcacatgggattccaggctgggaatcgccgtgttcggaggaggaacccagctgacagtgctgggcggaggaggaggaagcggaggaggaggatccggaggaggaggatctgaggtgcagctggtgcagtctggcgccgaggtgaagaagcctggacagtctctgaagatcagctgtaaggcttccggctactctctgaccgacaactggatcggatgggtgcggcagaagccaggcaagggactggagtggatgggcatcatctacccaggagactctgatacacgctactctcccagctttcagggccaggtgaccatctccgccgataagtctatcaacacagcttacctgcagtggagctccctgaaggccagcgacaccgctatctactactgcgtgggcctggattggaactacaacccactgaggtactggggacctggaaccctggtgacagtgtctagcaccacgacgccagcgccgcgaccaccaacaccggcgcccaccatcgcgtcgcagcccctgtccctgcgcccagaggcgtgccggccagcggcggggggcgcagtgcacacgagggggctggacttcgcctgtgatatctacatctgggcgcccttggccgggacttgtggggtccttctcctgtcactggttatcaccctttactgcaaacggggcagaaagaaactcctgtatatattcaaacaaccatttatgagaccagtacaaactactcaagaggaagatggctgtagctgccgatttccagaagaagaagaaggaggatgtgaactgagagtgaagttcagcaggagcgcagacgcccccgcgtacaagcagggccagaaccagctctataacgagctcaatctaggacgaagagaggagtacgatgttttggacaagaggcgtggccgggaccctgagatggggggaaagccgagaaggaagaaccctcaggaaggcctgtacaatgaactgcagaaagataagatggcggaggcctacagtgagattgggatgaaaggcgagcgccggaggggcaaggggcacgatggcctttaccagggtctcagtacagccaccaaggacacctacgacgcccttcacatgcaggccctgccccctcgctaa

SEQ ID NO: 280 - protein, 69 aa, Homo sapiens; identical to SEQ ID NO: 30

SEQ ID NO: 281 - protein, 24 aa, Homo sapiens
IYIWAPLAGTCGVLLLSLVITLYC

SEQ ID NO: 282 - protein, 254 aa, Homo sapiens
ESKYGPPCPPCPAPEFLGGPSVFLFPPKPKDTLMISRTPEVTCVVVDVSQEDPEVQFNWYVDGVEVHNAKTKPREEQFNSTYRVVSVLTVLHQDWLNGKEYKCKVSNKGLPSSIEKTISKAKGQPREPQVYTLPPSQEEMTKNQVSLTCLVKGFYPSDIAVEWESNGQPENNYKTTPPVLDSDGSFFLYSRLTVDKSRWQEGNVFSCSVMHEALHNHYTQKSLSLSLGKMIYIWAPLAGTCGVLLLSLVITLYC

SEQ ID NO: 283 - DNA, 462 bp, Homo sapiens
atgtacaggatgcaactcctgtcttgcattgcactaagtcttgcacttgtcacaaacagtgcacctacttcaagttctacaaagaaaacacagctacaactggagcatttactgctggatttacagatgattttgaatggaattaataattacaagaatcccaaactcaccaggatgctcacatttaagttttacatgcccaagaaggccacagaactgaaacatcttcagtgtctagaagaagaactcaaacctctggaggaagtgctaaatttagctcaaagcaaaaactttcacttaagacccagggacttaatcagcaatatcaacgtaatagttctggaactaaagggatctgaaacaacattcatgtgtgaatatgctgatgagacagcaaccattgtagaatttctgaacagatggattaccttttgtcaaagcatcatctcaacactgacttga

SEQ ID NO: 284 - DNA, 10179 bp, Homo sapiens
cggctccggtgcccgtcagtgggcagagcgcacatcgcccacagtccccgagaagttggggggaggggtcggcaattgaaccggtgcctagagaaggtggcgcggggtaaactgggaaagtgatgtcgtgtactggctccgcctttttcccgagggtgggggagaaccgtatataagtgcagtagtcgccgtgaacgttctttttcgcaacgggtttgccgccagaacacaggatccgccaccatggccttaccagtgaccgccttgctcctgccgctggccttgctgctccacgccgccaggccggatatccagatgacccagagcccgagcagcctgagcgcgagcgtgggtgatcgcgtgaccattacctgcagggcaagtcaggacattagtaaatatttaaattggtatcagcagaaaccgggtaaagcgccgaaactgttaatttatcatacatcaagattacactcaggcgtgccgtcgcgttttagcggctcgggttcgggcaccgattttaccctgaccatctcgagcttgcagccggaggacttcgccacctactattgccaacagggtaatacgcttccgtacacgttcggtcagggcaccaaagtggagatcaaaggtggcggtggctcgggcggtggtgggtcgggtggcggcggatctgaggtgcagctggtggagtctgggggaggcttggtacagcctggggggtccctgagactctcctgtgcagcctctggagtgtccctgcctgattatggcgtgtcctgggtccgccaggctccagggaaggggctggagtgggtttcagtgatctggggcagcgagacaacctactacaacagcgccctgaagtcccgattcaccatctccagagacaatgccaagaactcactgtatctgcaaatgaacagcctgagagccgaggacacggctgtgtattactgtgcgaagcactactactacggcggcagctacgctatggactactggggccaaggaaccctggtcaccgtgtcctcaaccacgacgccagcgccgcgaccaccaacaccggcgcccaccatcgcgtcgcagcccctgtccctgcgcccagaggcgtgccggccagcggcggggggcgcagtgcacacgagggggctggacttcgcctgtgatatctacatctgggcgcccttggccgggacttgtggggtccttctcctgtcactggttatcaccctttactgcaaacggggcagaaagaaactcctgtatatattcaaacaaccatttatgagaccagtacaaactactcaagaggaagatggctgtagctgccgatttccagaagaagaagaaggaggatgtgaactgagagtgaagttcagcaggagcgcagacgcccccgcgtaccagcagggccagaaccagctctataacgagctcaatctaggacgaagagaggagtacgatgttttggacaagaggcgtggccgggaccctgagatggggggaaagccgagaaggaagaaccctcaggaaggcctgtacaatgaactgcagaaagataagatggcggaggcctacagtgagattgggatgaaaggcgagcgccggaggggcaaggggcacgatggcctttaccagggtctcagtacagccaccaaggacacctacgacgcccttcacatgcaggccctgccccctcgctaagtcgactctagaactagtaatcaacctctggattacaaaatttgtgaaagattgactggtattcttaactatgttgctccttttacgctatgtggatacgctgctttaatgcctttgtatcatgctattgcttcccgtatggctttcattttctcctccttgtataaatcctggttgctgtctctttatgaggagttgtggcccgttgtcaggcaacgtggcgtggtgtgcactgtgtttgctgacgcaacccccactggttggggcattgccaccacctgtcagctcctttccgggactttcgctttccccctccctattgccacggcggaactcatcgccgcctgccttgcccgctgctggacaggggctcggctgttgggcactgacaattccgtggtgttgtcggggaagctgacgtcctttccatggctgctcgcctgtgttgccacctggattctgcgcgggacgtccttctgctacgtcccttcggccctcaatccagcggaccttccttcccgcggcctgctgccggctctgcggcctcttccgcgtcttcgccttcgccctcagacgagtcggatctccctttgggccgcctccccgcctgccgcggaattcgagctcggtacctttaagaccaatgacttacaaggcagctgtagatcttagccactttttaaaagaaaaggggggactggaagggctaattcactcccaacgaagacaagatctgctttttgcttgtactgggtctctctggttagaccagatctgagcctgggagctctctggctaactagggaacccactgcttaagcctcaataaagcttgccttgagtgcttcaagtagtgtgtgcccgtctgttgtgtgactctggtaactagagatccctcagacccttttagtcagtgtggaaaatctctagcagtagtagttcatgtcatcttattattcagtatttataacttgcaaagaaatgaatatcagagagtgagaggaacttgtttattgcagcttataatggttacaaataaagcaatagcatcacaaatttcacaaataaagcatttttttcactgcattctagttgtggtttgtccaaactcatcaatgtatcttatcatgtctggctctagctatcccgcccctaactccgcccatcccgcccctaactccgcccagttccgcccattctccgccccatggctgactaattttttttatttatgcagaggccgaggccgcctcggcctctgagctattccagaagtagtgaggaggcttttttggaggcctagggacgtacccaattcgccctatagtgagtcgtattacgcgcgctcactggccgtcgttttacaacgtcgtgactgggaaaaccctggcgttacccaacttaatcgccttgcagcacatccccctttcgccagctggcgtaatagcgaagaggcccgcaccgatcgcccttcccaacagttgcgcagcctgaatggcgaatgggacgcgccctgtagcggcgcattaagcgcggcgggtgtggtggttacgcgcagcgtgaccgctacacttgccagcgccctagcgcccgctcctttcgctttcttcccttcctttctcgccacgttcgccggctttccccgtcaagctctaaatcgggggctccctttagggttccgatttagtgctttacggcacctcgaccccaaaaaacttgattagggtgatggttcacgtagtgggccatcgccctgatagacggtttttcgccctttgacgttggagtccacgttctttaatagtggactcttgttccaaactggaacaacactcaaccctatctcggtctattcttttgatttataagggattttgccgatttcggcctattggttaaaaaatgagctgatttaacaaaaatttaacgcgaattttaacaaaatattaacgcttacaatttgaagatcctttgatcttttctacggggtctgacgctcagtggaacgaaaactcacgttaagggattttggtcatgaacaataaaactgtctgcttacataaacagtaatacaaggggtgttatgagccatattcaacgggaaacgtcttgctctaggccgcgattaaattccaacatggatgctgatttatatgggtataaatgggctcgcgataatgtcgggcaatcaggtgcgacaatctatcgattgtatgggaagcccgatgcgccagagttgtttctgaaacatggcaaaggtagcgttgccaatgatgttacagatgagatggtcagactaaactggctgacggaatttatgcctcttccgaccatcaagcattttatccgtactcctgatgatgcatggttactcaccactgcgatccccgggaaaacagcattccaggtattagaagaatatcctgattcaggtgaaaatattgttgatgcgctggcagtgttcctgcgccggttgcattcgattcctgtttgtaattgtccttttaacagcgatcgcgtatttcgtctggctcaggcgcaatcacgaatgaataacggtttggttgatgcgagtgattttgatgacgagcgtaatggctggcctgttgaacaagtctggaaagaaatgcataaacttttgccattctcaccggattcagtcgtcactcatggtgatttctcacttgataaccttatttttgacgaggggaaattaataggttgtattgatgttggacgagtcggaatcgcagaccgataccaggatcttgccatcctatggaactgcctcggtgagttttctccttcattacagaaacggctttttcaaaaatatggtattgataatcctgatatgaataaattgcagtttcatttgatgctcgatgagtttttctaactgtcagaccaagtttactcatatatactttagattgatttaaaacttcatttttaatttaaaaggatctaggtgaagatcctttttgataatctcatgaccaaaatcccttaacgtgagttttcgttccactgagcgtcagaccccgtagaaaagatcaaaggatcttcttgagatcctttttttctgcgcgtaatctgctgcttgcaaacaaaaaaaccaccgctaccagcggtggtttgtttgccggatcaagagctaccaactctttttccgaaggtaactggcttcagcagagcgcagataccaaatactgttcttctagtgtagccgtagttaggccaccacttcaagaactctgtagcaccgcctacatacctcgctctgctaatcctgttaccagtggctgctgccagtggcgataagtcgtgtcttaccgggttggactcaagacgatagttaccggataaggcgcagcggtcgggctgaacggggggttcgtgcacacagcccagcttggagcgaacgacctacaccgaactgagatacctacagcgtgagctatgagaaagcgccacgcttcccgaagggagaaaggcggacaggtatccggtaagcggcagggtcggaacaggagagcgcacgagggagcttccagggggaaacgcctggtatctttatagtcctgtcgggtttcgccacctctgacttgagcgtcgatttttgtgatgctcgtcaggggggcggagcctatggaaaaacgccagcaacgcggcctttttacggttcctggccttttgctggccttttgctcacatgttctttcctgcgttatcccctgattctgtggataaccgtattaccgcctttgagtgagctgataccgctcgccgcagccgaacgaccgagcgcagcgagtcagtgagcgaggaagcggaagagcgcccaatacgcaaaccgcctctccccgcgcgttggccgattcattaatgcagctggcacgacaggtttcccgactggaaagcgggcagtgagcgcaacgcaattaatgtgagttagctcactcattaggcaccccaggctttacactttatgcttccggctcgtatgttgtgtggaattgtgagcggataacaatttcacacaggaaacagctatgaccatgattacgccaagcgcgcaattaaccctcactaaagggaacaaaagctggagctgcaagcttaatgtagtcttatgcaatactcttgtagtcttgcaacatggtaacgatgagttagcaacatgccttacaaggagagaaaaagcaccgtgcatgccgattggtggaagtaaggtggtacgatcgtgccttattaggaaggcaacagacgggtctgacatggattggacgaaccactgaattgccgcattgcagagatattgtatttaagtgcctagctcgatacataaacgggtctctctggttagaccagatctgagcctgggagctctctggctaactagggaacccactgcttaagcctcaataaagcttgccttgagtgcttcaagtagtgtgtgcccgtctgttgtgtgactctggtaactagagatccctcagacccttttagtcagtgtggaaaatctctagcagtggcgcccgaacagggacttgaaagcgaaagggaaaccagaggagctctctcgacgcaggactcggcttgctgaagcgcgcacggcaagaggcgaggggcggcgactggtgagtacgccaaaaattttgactagcggaggctagaaggagagagatgggtgcgagagcgtcagtattaagcgggggagaattagatcgcgatgggaaaaaattcggttaaggccagggggaaagaaaaaatataaattaaaacatatagtatgggcaagcagggagctagaacgattcgcagttaatcctggcctgttagaaacatcagaaggctgtagacaaatactgggacagctacaaccatcccttcagacaggatcagaagaacttagatcattatataatacagtagcaaccctctattgtgtgcatcaaaggatagagataaaagacaccaaggaagctttagacaagatagaggaagagcaaaacaaaagtaagaccaccgcacagcaagcggccgctgatcttcagacctggaggaggagatatgagggacaattggagaagtgaattatataaatataaagtagtaaaaattgaaccattaggagtagcacccaccaaggcaaagagaagagtggtgcagagagaaaaaagagcagtgggaataggagctttgttccttgggttcttgggagcagcaggaagcactatgggcgcagcgtcaatgacgctgacggtacaggccagacaattattgtctggtatagtgcagcagcagaacaatttgctgagggctattgaggcgcaacagcatctgttgcaactcacagtctggggcatcaagcagctccaggcaagaatcctggctgtggaaagatacctaaaggatcaacagctcctggggatttggggttgctctggaaaactcatttgcaccactgctgtgccttggaatgctagttggagtaataaatctctggaacagatttggaatcacacgacctggatggagtgggacagagaaattaacaattacacaagcttaatacactccttaattgaagaatcgcaaaaccagcaagaaaagaatgaacaagaattattggaattagataaatgggcaagtttgtggaattggtttaacataacaaattggctgtggtatataaaattattcataatgatagtaggaggcttggtaggtttaagaatagtttttgctgtactttctatagtgaatagagttaggcagggatattcaccattatcgtttcagacccacctcccaaccccgaggggacccgacaggcccgaaggaatagaagaagaaggtggagagagagacagagacagatccattcgattagtgaacggatctcgacggtatcgatcacgagactagcctcgacacaaatggcagtattcatccacaattttaaaagaaaaggggggattggggggtacagtgcaggggaaagaatagtagacataatagcaacagacatacaaactaaagaattacaaaaacaaattacaaaaattcaaaattttcgggtttattacagggacagcagagatccagtttatcgacttaacttgtttattgcagcttataatggttacaaataaggcaatagcatcacaaatttcacaaataaggcatttttttcactgcattctagttttggtttgtccaaactcatcaatgtatcttatcatgtctggatctcaaatccctcggaagctgcgcctgtcttaggttggagtgatacatttttatcacttttacccgtctttggattaggcagtagctctgacggccctcctgtcttaggttagtgaaaaatgtcactctcttacccgtcattggctgtccagcttagctcgcaggggaggtggtcttcatcagctggcgttcaggtagctcatcacccggtcgatggtcacggcccggatccggaaggcatgcaggaggatgcacagcttgatcttggtcttgtagaagtcgggctcttccaggctggacttctggggcactgtctcgctgttgaagttcagggcctgcatcagctcgtcgatcacggccagcatgttctgatccaggaagatctgccgcttggggtccatcagcagcttggcgttcatggtcttgaactccacctggtacatcttcaggtcctcgtagatgctgctcaggcacagggccatcatgaagctggtctttctgctggccaggcaagagccgttggtgatgaagcttgtctcccgagagttcagacagctctcgttcttggtcagttccaggggcaggcaggcctccacggtgctggtcttatccttggtgatgtcctcgtggtcgatttcctcgctggtgcaggggtagaattccagggtctgccgggccttctgcagcatgttgctcacggcccgcagcaggttctggctgtggtgcaggcaggggaacatgccggggtcgggggtagccacgggcaggttccggcttcctccgccccctccgccgctgcagggcacgctggcccactcggaccaggagctgctgtagtaccggtcctgggcccgcacgctgatgctggcgttcttccggcagatcacggtggcgctggtcttgtcggtgaacacccggtctttcttctcccgcttgctcttgccctgcacctgcacacagaaggtcaggctgaagtagctgtggggggtggaccaggtgtcagggtactcccaggacacctccacctgccggctgttcttcaggggcttcagctgcaggttcttgggggggtcgggcttgatgatgtcccggatgaaaaagctggaggtgtagttctcgtacttcagcttgtgcacggcgtccaccatcacctcgatgggcaggctttcctcggcggcagggcaggcgctatcttcctggcactcgacgctgtactcgtactctttgttgtcgccccgcactctctcggcgctcagggtggcggctccgcaggtcacgccctgagggtcgctgctgccccggctgctcttcacgctgaaggtcaggtcggtgctgatggtggtcagccaccaacaggtgaaccggccgctgtagttcttggcctcgcaccgcaggaaggtcttgttcttgggctctttctggtccttcaggatgtcggtggaccagatgccatcctctttcttgtgcagcagcagcaggctgtgggacagcacttcgccgcccttgtggcaggtgtactggccggcgtcgccgaactctttgacctggatggtcagggtcttgccgctgcccagcacctcgctgctctggtccagggtccaggtgatgccgtcctcttcgggggtgtcgcaggtcagcaccaccatctcgccaggggcgtcgggataccagtccagctccaccacgtacacgtctttcttcagctcccagatggccaccagggggctggccaggaacaccaggctgaaccagctgatgaccagctgctgatgacacatggtggccaggagttgaggttactgtgagtagtgattaaagagagtgatagggaactcttgaacaagagatgcaatttatactgttaattctggaaaaatattatgggggtgtcaaaatgtcccgggaccaattgacgccttctgtatgaaacagtttttcctcctaattgacgccttctgtatgaaacagtttttcctcctaattgacgccttctgtatgaaacagtttttcctcctaattcgatgggaccaattgacgccttctgtatgaaacagtttttcctcctaattgacgccttctgtatgaaacagtttttcctcctaattgacgccttctgtatgaaacagtttttcctcctaattcgatatcaagcttatcgataccgtcgacctcgatgaattcgctagcaaatccactttggctcgagaagcttgatat

SEQ ID NO: 285 - protein, 153 aa, Homo sapiens
MYRMQLLSCIALSLALVTNSAPTSSSTKKTQLQLEHLLLDLQMILNGINNYKNPKLTRMLTFKFYMPKKATELKHLQCLEEELKPLEEVLNLAQSKNFHLRPRDLISNINVIVLELKGSETTFMCEYADETATIVEFLNRWITFCQSIISTLT

SEQ ID NO: 286 - DNA, 639 bp, Homo sapiens
atgaactccttctccacaagcgccttcggtccagttgccttctccctggggctgctcctggtgttgcctgctgccttccctgccccagtacccccaggagaagattccaaagatgtagccgccccacacagacagccactcacctcttcagaacgaattgacaaacaaattcggtacatcctcgacggcatctcagccctgagaaaggagacatgtaacaagagtaacatgtgtgaaagcagcaaagaggcactggcagaaaacaacctgaaccttccaaagatggctgaaaaagatggatgcttccaatctggattcaatgaggagacttgcctggtgaaaatcatcactggtcttttggagtttgaggtatacctagagtacctccagaacagatttgagagtagtgaggaacaagccagagctgtgcagatgagtacaaaagtcctgatccagttcctgcagaaaaaggcaaagaatctagatgcaataaccacccctgacccaaccacaaatgccagcctgctgacgaagctgcaggcacagaaccagtggctgcaggacatgacaactcatctcattctgcgcagctttaaggagttcctgcagtccagcctgagggctcttcggcaaatgtag

SEQ ID NO: 287 - protein, 212 aa, Homo sapiens
MNSFSTSAFGPVAFSLGLLLVLPAAFPAPVPPGEDSKDVAAPHRQPLTSSERIDKQIRYILDGISALRKETCNKSNMCESSKEALAENNLNLPKMAEKDGCFQSGFNEETCLVKIITGLLEFEVYLEYLQNRFESSEEQARAVQMSTKVLIQFLQKKAKNLDAITTPDPTTNASLLTKLQAQNQWLQDMTTHLILRSFKEFLQSSLRALRQM

SEQ ID NO: 288 - DNA, 534 bp, Homo sapiens
atgttccatgtttcttttaggtatatctttggacttcctcccctgatccttgttctgttgccagtagcatcatctgattgtgatattgaaggtaaagatggcaaacaatatgagagtgttctaatggtcagcatcgatcaattattggacagcatgaaagaaattggtagcaattgcctgaataatgaatttaacttttttaaaagacatatctgtgatgctaataaggaaggtatgtttttattccgtgctgctcgcaagttgaggcaatttcttaaaatgaatagcactggtgattttgatctccacttattaaaagtttcagaaggcacaacaatactgttgaactgcactggccaggttaaaggaagaaaaccagctgccctgggtgaagcccaaccaacaaagagtttggaagaaaataaatctttaaaggaacagaaaaaactgaatgacttgtgtttcctaaagagactattacaagagataaaaacttgttggaataaaattttgatgggcactaaagaacactga

SEQ ID NO: 289 - protein, 177 aa, Homo sapiens
MFHVSFRYIFGLPPLILVLLPVASSDCDIEGKDGKQYESVLMVSIDQLLDSMKEIGSNCLNNEFNFFKRHICDANKEGMFLFRAARKLRQFLKMNSTGDFDLHLLKVSEGTTILLNCTGQVKGRKPAALGEAQPTKSLEENKSLKEQKKLNDLCFLKRLLQEIKTCWNKILMGTKEH

SEQ ID NO: 290 - DNA, 489 bp, Homo sapiens
atgagaatttcgaaaccacatttgagaagtatttccatccagtgctacttgtgtttacttctaaacagtcattttctaactgaagctggcattcatgtcttcattttgggctgtttcagtgcagggcttcctaaaacagaagccaactgggtgaatgtaataagtgatttgaaaaaaattgaagatcttattcaatctatgcatattgatgctactttatatacggaaagtgatgttcaccccagttgcaaagtaacagcaatgaagtgctttctcttggagttacaagttatttcacttgagtccggagatgcaagtattcatgatacagtagaaaatctgatcatcctagcaaacaacagtttgtcttctaatgggaatgtaacagaatctggatgcaaagaatgtgaggaactggaggaaaaaaatattaaagaatttttgcagagttttgtacatattgtccaaatgttcatcaacacttcttga

SEQ ID NO: 291 - protein, 162 aa, Homo sapiens
MRISKPHLRSISIQCYLCLLLNSHFLTEAGIHVFILGCFSAGLPKTEANWVNVISDLKKIEDLIQSMHIDATLYTESDVHPSCKVTAMKCFLLELQVISLESGDASIHDTVENLIILANNSLSSNGNVTESGCKECEELEEKNIKEFLQSFVHIVQMFINTS

SEQ ID NO: 292 - DNA, 468 bp, Homo sapiens
atgactcctgggaagacctcattggtgtcactgctactgctgctgagcctggaggccatagtgaaggcaggaatcacaatcccacgaaatccaggatgcccaaattctgaggacaagaacttcccccggactgtgatggtcaacctgaacatccataaccggaataccaataccaatcccaaaaggtcctcagattactacaaccgatccacctcaccttggaatctccaccgcaatgaggaccctgagagatatccctctgtgatctgggaggcaaagtgccgccacttgggctgcatcaacgctgatgggaacgtggactaccacatgaactctgtccccatccagcaagagatcctggtcctgcgcagggagcctccacactgccccaactccttccggctggagaagatactggtgtccgtgggctgcacctgtgtcaccccgattgtccaccatgtggcctaa

SEQ ID NO: 293 - protein, 155 aa, Homo sapiens
MTPGKTSLVSLLLLLSLEAIVKAGITIPRNPGCPNSEDKNFPRTVMVNLNIHNRNTNTNPKRSSDYYNRSTSPWNLHRNEDPERYPSVIWEAKCRHLGCINADGNVDYHMNSVPIQQEILVLRREPPHCPNSFRLEKILVSVGCTCVTPIVHHVA

SEQ ID NO: 294 - DNA, 387 bp, Homo sapiens
atgaaaccgtatgcccgcatggaggagtatgagaggaacatcgaggagatggtggcccagctgaggaacagctcagagctggcccagagaaagtgtgaggtcaacttgcagctgtggatgtccaacaagaggagcctgtctccctggggctacagcatcaaccacgaccccagccgtatccccgtggacctgccggaggcacggtgcctgtgtctgggctgtgtgaaccccttcaccatgcaggaggaccgcagcatggtgagcgtgccggtgttcagccaggttcctgtgcgccgccgcctctgcccgccaccgccccgcacagggccttgccgccagcgcgcagtcatggagaccatcgctgtgggctgcacctgcatcttctga

SEQ ID NO: 295 - protein, 128 aa, Homo sapiens
MKPYARMEEYERNIEEMVAQLRNSSELAQRKCEVNLQLWMSNKRSLSPWGYSINHDPSRIPVDLPEARCLCLGCVNPFTMQEDRSMVSVPVFSQVPVRRRLCPPPPRTGPCRQRAVMETIAVGCTCIF

SEQ ID NO: 296 - DNA, 594 bp, Homo sapiens
atgacgctcctccccggcctcctgtttctgacctggctgcacacatgcctggcccaccatgacccctccctcagggggcacccccacagtcacggtaccccacactgctactcggctgaggaactgcccctcggccaggcccccccacacctgctggctcgaggtgccaagtgggggcaggctttgcctgtagccctggtgtccagcctggaggcagcaagccacagggggaggcacgagaggccctcagctacgacccagtgcccggtgctgcggccggaggaggtgttggaggcagacacccaccagcgctccatctcaccctggagataccgtgtggacacggatgaggaccgctatccacagaagctggccttcgccgagtgcctgtgcagaggctgtatcgatgcacggacgggccgcgagacagctgcgctcaactccgtgcggctgctccagagcctgctggtgctgcgccgccggccctgctcccgcgacggctcggggctccccacacctggggcctttgccttccacaccgagttcatccacgtccccgtcggctgcacctgcgtgctgccccgttcagtgtga

SEQ ID NO: 297 - protein, 197 aa, Homo sapiens
MTLLPGLLFLTWLHTCLAHHDPSLRGHPHSHGTPHCYSAEELPLGQAPPHLLARGAKWGQALPVALVSSLEAASHRGRHERPSATTQCPVLRPEEVLEADTHQRSISPWRYRVDTDEDRYPQKLAFAECLCRGCIDARTGRETAALNSVRLLQSLLVLRRRPCSRDGSGLPTPGAFAFHTEFIHVPVGCTCVLPRSV

SEQ ID NO: 298 - DNA, 609 bp, Homo sapiens
atgctggtagccggcttcctgctggcgctgccgccgagctgggccgcgggcgccccgagggcgggcaggcgccccgcgcggccgcggggctgcgcggaccggccggaggagctactggagcagctgtacgggcgcctggcggccggcgtgctcagtgccttccaccacacgctgcagctggggccgcgtgagcaggcgcgcaacgcgagctgcccggcagggggcaggcccgccgaccgccgcttccggccgcccaccaacctgcgcagcgtgtcgccctgggcctacagaatctcctacgacccggcgaggtaccccaggtacctgcctgaagcctactgcctgtgccggggctgcctgaccgggctgttcggcgaggaggacgtgcgcttccgcagcgcccctgtctacatgcccaccgtcgtcctgcgccgcacccccgcctgcgccggcggccgttccgtctacaccgaggcctacgtcaccatccccgtgggctgcacctgcgtccccgagccggagaaggacgcagacagcatcaactccagcatcgacaaacagggcgccaagctcctgctgggccccaacgacgcgcccgctggcccctga

SEQ ID NO: 299 - protein, 202 aa, Homo sapiens
MLVAGFLLALPPSWAAGAPRAGRRPARPRGCADRPEELLEQLYGRLAAGVLSAFHHTLQLGPREQARNASCPAGGRPADRRFRPPTNLRSVSPWAYRISYDPARYPRYLPEAYCLCRGCLTGLFGEEDVRFRSAPVYMPTVVLRRTPACAGGRSVYTEAYVTIPVGCTCVPEPEKDADSINSSIDKQGAKLLLGPNDAPAGP

SEQ ID NO: 300 - DNA, 492 bp, Homo sapiens
atgacagtgaagaccctgcatggcccagccatggtcaagtacttgctgctgtcgatattggggcttgcctttctgagtgaggcggcagctcggaaaatccccaaagtaggacatacttttttccaaaagcctgagagttgcccgcctgtgccaggaggtagtatgaagcttgacattggcatcatcaatgaaaaccagcgcgtttccatgtcacgtaacatcgagagccgctccacctccccctggaattacactgtcacttgggaccccaaccggtacccctcggaagttgtacaggcccagtgtaggaacttgggctgcatcaatgctcaaggaaaggaagacatctccatgaattccgttcccatccagcaagagaccctggtcgtccggaggaagcaccaaggctgctctgtttctttccagttggagaaggtgctggtgactgttggctgcacctgcgtcacccctgtcatccaccatgtgcagtaa

SEQ ID NO: 301 - protein, 163 aa, Homo sapiens
MTVKTLHGPAMVKYLLLSILGLAFLSEAAARKIPKVGHTFFQKPESCPPVPGGSMKLDIGIINENQRVSMSRNIESRSTSPWNYTVTWDPNRYPSEVVQAQCRNLGCINAQGKEDISMNSVPIQQETLVVRRKHQGCSVSFQLEKVLVTVGCTCVTPVIHHVQ

SEQ ID NO: 302 - DNA, 570 bp, Homo sapiens
atgctggggagcagagctgtaatgctgctgttgctgctgccctggacagctcagggcagagctgtgcctgggggcagcagccctgcctggactcagtgccagcagctttcacagaagctctgcacactggcctggagtgcacatccactagtgggacacatggatctaagagaagagggagatgaagagactacaaatgatgttccccatatccagtgtggagatggctgtgacccccaaggactcagggacaacagtcagttctgcttgcaaaggatccaccagggtctgattttttatgagaagctgctaggatcggatattttcacaggggagccttctctgctccctgatagccctgtgggccagcttcatgcctccctactgggcctcagccaactcctgcagcctgagggtcaccactgggagactcagcagattccaagcctcagtcccagccagccatggcagcgtctccttctccgcttcaaaatccttcgcagcctccaggcctttgtggctgtagccgcccgggtctttgcccatggagcagcaaccctgagtccctaa

SEQ ID NO: 303 - protein, 189 aa, Homo sapiens
MLGSRAVMLLLLLPWTAQGRAVPGGSSPAWTQCQQLSQKLCTLAWSAHPLVGHMDLREEGDEETTNDVPHIQCGDGCDPQGLRDNSQFCLQRIHQGLIFYEKLLGSDIFTGEPSLLPDSPVGQLHASLLGLSQLLQPEGHHWETQQIPSLSPSQPWQRLLLRFKILRSLQAFVAVAARVFAHGAATLSP

SEQ ID NO: 304 - DNA, 570 bp, Homo sapiens
atggctgctgaaccagtagaagacaattgcatcaactttgtggcaatgaaatttattgacaatacgctttactttatagaaaacctggaatcagattactttggcaagcttgaatctaaattatcagtcataagaaatttgaatgaccaagttctcttcattgaccaaggaaatcggcctctatttgaagatatgactgattctgactgtagagataatgcaccccggaccatatttattataagtatgtataaagatagccagcctagaggtatggctgtaactatctctgtgaagtgtgagaaaatttcaactctctcctgtgagaacaaaattatttcctttaaggaaatgaatcctcctgataacatcaaggatacaaaaagtgacatcatattctttcagagaagtgtcccaggacatgataataagatgcaatttgaatcttcatcatacgaaggatactttctagcttgtgaaaaagagagagacctttttaaactcattttgaaaaaagaggatgaattgggggatagatctataatgttcactgttcaaaacgaagactag

SEQ ID NO: 305 - protein, 189 aa, Homo sapiens
MAAEPVEDNCINFVAMKFIDNTLYFIENLESDYFGKLESKLSVIRNLNDQVLFIDQGNRPLFEDMTDSDCRDNAPRTIFIISMYKDSQPRGMAVTISVKCEKISTLSCENKIISFKEMNPPDNIKDTKSDIIFFQRSVPGHDNKMQFESSSYEGYFLACEKERDLFKLILKKEDELGDRSIMFTVQNED

SEQ ID NO: 306 - DNA, 762 bp, Homo sapiens
atgtggccccctgggtcagcctcccagccaccgccctcacctgccgcggccacaggtctgcatccagcggctcgccctgtgtccctgcagtgccggctcagcatgtgtccagcgcgcagcctcctccttgtggctaccctggtcctcctggaccacctcagtttggccagaaacctccccgtggccactccagacccaggaatgttcccatgccttcaccactcccaaaacctgctgagggccgtcagcaacatgctccagaaggccagacaaactctagaattttacccttgcacttctgaagagattgatcatgaagatatcacaaaagataaaaccagcacagtggaggcctgtttaccattggaattaaccaagaatgagagttgcctaaattccagagagacctctttcataactaatgggagttgcctggcctccagaaagacctcttttatgatggccctgtgccttagtagtatttatgaagacttgaagatgtaccaggtggagttcaagaccatgaatgcaaagcttctgatggatcctaagaggcagatctttctagatcaaaacatgctggcagttattgatgagctgatgcaggccctgaatttcaacagtgagactgtgccacaaaaatcctcccttgaagaaccggatttttataaaactaaaatcaagctctgcatacttcttcatgctttcagaattcgggcagtgactattgatagagtgatgagctatctgaatgcttcctaa

SEQ ID NO: 307 - protein, 253 aa, Homo sapiens
MWPPGSASQPPPSPAAATGLHPAARPVSLQCRLSMCPARSLLLVATLVLLDHLSLARNLPVATPDPGMFPCLHHSQNLLRAVSNMLQKARQTLEFYPCTSEEIDHEDITKDKTSTVEACLPLELTKNESCLNSRETSFITNGSCLASRKTSFMMALCLSSIYEDLKMYQVEFKTMNAKLLMDPKRQIFLDQNMLAVIDELMQALNFNSETVPQKSSLEEPDFYKTKIKLCILLHAFRIRAVTIDRVMSYLNAS

SEQ ID NO: 308 - DNA, 987 bp, Homo sapiens
atgtgtcaccagcagttggtcatctcttggttttccctggtttttctggcatctcccctcgtggccatatgggaactgaagaaagatgtttatgtcgtagaattggattggtatccggatgcccctggagaaatggtggtcctcacctgtgacacccctgaagaagatggtatcacctggaccttggaccagagcagtgaggtcttaggctctggcaaaaccctgaccatccaagtcaaagagtttggagatgctggccagtacacctgtcacaaaggaggcgaggttctaagccattcgctcctgctgcttcacaaaaaggaagatggaatttggtccactgatattttaaaggaccagaaagaacccaaaaataagacctttctaagatgcgaggccaagaattattctggacgtttcacctgctggtggctgacgacaatcagtactgatttgacattcagtgtcaaaagcagcagaggctcttctgacccccaaggggtgacgtgcggagctgctacactctctgcagagagagtcagaggggacaacaaggagtatgagtactcagtggagtgccaggaggacagtgcctgcccagctgctgaggagagtctgcccattgaggtcatggtggatgccgttcacaagctcaagtatgaaaactacaccagcagcttcttcatcagggacatcatcaaacctgacccacccaagaacttgcagctgaagccattaaagaattctcggcaggtggaggtcagctgggagtaccctgacacctggagtactccacattcctacttctccctgacattctgcgttcaggtccagggcaagagcaagagagaaaagaaagatagagtcttcacggacaagacctcagccacggtcatctgccgcaaaaatgccagcattagcgtgcgggcccaggaccgctactatagctcatcttggagcgaatgggcatctgtgccctgcagttag

SEQ ID NO: 309 - protein, 328 aa, Homo sapiens
MCHQQLVISWFSLVFLASPLVAIWELKKDVYVVELDWYPDAPGEMVVLTCDTPEEDGITWTLDQSSEVLGSGKTLTIQVKEFGDAGQYTCHKGGEVLSHSLLLLHKKEDGIWSTDILKDQKEPKNKTFLRCEAKNYSGRFTCWWLTTISTDLTFSVKSSRGSSDPQGVTCGAATLSAERVRGDNKEYEYSVECQEDSACPAAEESLPIEVMVDAVHKLKYENYTSSFFIRDIIKPDPPKNLQLKPLKNSRQVEVSWEYPDTWSTPHSYFSLTFCVQVQGKSKREKKDRVFTDKTSATVICRKNASISVRAQDRYYSSSWSEWASVPCS

SEQ ID NO: 310 - protein, 532 aa, Homo sapiens
MCHQQLVISWFSLVFLASPLVAIWELKKDVYVVELDWYPDAPGEMVVLTCDTPEEDGITWTLDQSSEVLGSGKTLTIQVKEFGDAGQYTCHKGGEVLSHSLLLLHKKEDGIWSTDILKDQKEPKNKTFLRCEAKNYSGRFTCWWLTTISTDLTFSVKSSRGSSDPQGVTCGAATLSAERVRGDNKEYEYSVECQEDSACPAAEESLPIEVMVDAVHKLKYENYTSSFFIRDIIKPDPPKNLQLKPLKNSRQVEVSWEYPDTWSTPHSYFSLTFCVQVQGKSKREKKDRVFTDKTSATVICRKNASISVRAQDRYYSSSWSEWASVPCSGGGGGGSRNLPVATPDPGMFPCLHHSQNLLRAVSNMLQKARQTLEFYPCTSEEIDHEDITKDKTSTVEACLPLELTKNESCLNSRETSFITNGSCLASRKTSFMMALCLSSIYEDLKMYQVEFKTMNAKLLMDPKRQIFLDQNMLAVIDELMQALNFNSETVPQKSSLEEPDFYKTKIKLCILLHAFRIRAVTIDRVMSYLNAS

SEQ ID NO: 311 - protein, 505 aa, Homo sapiens
MCHQQLVISWFSLVFLASPLVAIWELKKDVYVVELDWYPDAPGEMVVLTCDTPEEDGITWTLDQSSEVLGSGKTLTIQVKEFGDAGQYTCHKGGEVLSHSLLLLHKKEDGIWSTDILKDQKEPKNKTFLRCEAKNYSGRFTCWWLTTISTDLTFSVKSSRGSSDPQGVTCGAATLSAERVRGDNKEYEYSVECQEDSACPAAEESLPIEVMVDAVHKLKYENYTSSFFIRDIIKPDPPKNLQLKPLKNSRQVEVSWEYPDTWSTPHSYFSLTFCVQVQGKSKREKKDRVFTDKTSATVICRKNASISVRAQDRYYSSSWSEWASVPCSGGGGGGSRAVPGGSSPAWTQCQQLSQKLCTLAWSAHPLVGHMDLREEGDEETTNDVPHIQCGDGCDPQGLRDNSQFCLQRIHQGLIFYEKLLGSDIFTGEPSLLPDSPVGQLHASLLGLSQLLQPEGHHWETQQIPSLSPSQPWQRLLLRFKILRSLQAFVAVAARVFAHGAATLSP

SEQ ID NO: 312 - protein, 601 aa, Homo sapiens
MCHQQLVISWFSLVFLASPLVAIWELKKDVYVVELDWYPDAPGEMVVLTCDTPEEDGITWTLDQSSEVLGSGKTLTIQVKEFGDAGQYTCHKGGEVLSHSLLLLHKKEDGIWSTDILKDQKEPKNKTFLRCEAKNYSGRFTCWWLTTISTDLTFSVKSSRGSSDPQGVTCGAATLSAERVRGDNKEYEYSVECQEDSACPAAEESLPIEVMVDAVHKLKYENYTSSFFIRDIIKPDPPKNLQLKPLKNSRQVEVSWEYPDTWSTPHSYFSLTFCVQVQGKSKREKKDRVFTDKTSATVICRKNASISVRAQDRYYSSSWSEWASVPCSGGGGGGSRNLPVATPDPGMFPCLHHSQNLLRAVSNMLQKARQTLEFYPCTSEEIDHEDITKDKTSTVEACLPLELTKNESCLNSRETSFITNGSCLASRKTSFMMALCLSSIYEDLKMYQVEFKTMNAKLLMDPKRQIFLDQNMLAVIDELMQALNFNSETVPQKSSLEEPDFYKTKIKLCILLHAFRIRAVTIDRVMSYLNASTTTPAPRPPTPAPTIASQPLSLRPEACRPAAGGAVHTRGLDFACDIYIWAPLAGTCGVLLLSLVITLYC

SEQ ID NO: 313 - protein, 786 aa, Homo sapiens
MCHQQLVISWFSLVFLASPLVAIWELKKDVYVVELDWYPDAPGEMVVLTCDTPEEDGITWTLDQSSEVLGSGKTLTIQVKEFGDAGQYTCHKGGEVLSHSLLLLHKKEDGIWSTDILKDQKEPKNKTFLRCEAKNYSGRFTCWWLTTISTDLTFSVKSSRGSSDPQGVTCGAATLSAERVRGDNKEYEYSVECQEDSACPAAEESLPIEVMVDAVHKLKYENYTSSFFIRDIIKPDPPKNLQLKPLKNSRQVEVSWEYPDTWSTPHSYFSLTFCVQVQGKSKREKKDRVFTDKTSATVICRKNASISVRAQDRYYSSSWSEWASVPCSGGGGGGSRNLPVATPDPGMFPCLHHSQNLLRAVSNMLQKARQTLEFYPCTSEEIDHEDITKDKTSTVEACLPLELTKNESCLNSRETSFITNGSCLASRKTSFMMALCLSSIYEDLKMYQVEFKTMNAKLLMDPKRQIFLDQNMLAVIDELMQALNFNSETVPQKSSLEEPDFYKTKIKLCILLHAFRIRAVTIDRVMSYLNASESKYGPPCPPCPAPEFLGGPSVFLFPPKPKDTLMISRTPEVTCVVVDVSQEDPEVQFNWYVDGVEVHNAKTKPREEQFNSTYRVVSVLTVLHQDWLNGKEYKCKVSNKGLPSSIEKTISKAKGQPREPQVYTLPPSQEEMTKNQVSLTCLVKGFYPSDIAVEWESNGQPENNYKTTPPVLDSDGSFFLYSRLTVDKSRWQEGNVFSCSVMHEALHNHYTQKSLSLSLGKMIYIWAPLAGTCGVLLLSLVITLYC

SEQ ID NO: 314 - protein, 219 aa, Homo sapiens
HYFQQKVFVLLAALRPQWCSREIPDPANSTCAKKYPIAEEKTQLPLDRLLIDWPTPEDPEPLVISEVLHQVTPVFRHPPCSNWPQREKGIQGHQASEKDMMHSASSPPPPRALQAESRQLVDLYKVLESRGSDPKPENPACPWTVLPAGDLPTHDGYLPSNIDDLPSHEAPLADSLEELEPQHISLSVFPSSSLHPLTFSCGDKLTLDQLKMRCDSLML

SEQ ID NO: 315 - protein, 191 aa, Homo sapiens
YRVDLVLFYRHLTRRDETLTDGKTYDAFVSYLKECRPENGEEHTFAVEILPRVLEKHFGYKLCIFERDVVPGGAVVDEIHSLIEKSRRLIIVLSKSYMSNEVRYELESGLHEALVERKIKIILIEFTPVTDFTFLPQSLKLLKSHRVLKWKADKSLSYNSRFWKNLLYLMPAKTVKPGRDEPEVLPVLSES

SEQ ID NO: 316 - protein, 253 aa, Homo sapiens
NRSFRTGIKRRILLLIPKWLYEDIPNMKNSNVVKMLQENSELMNNNSSEQVLYVDPMITEIKEIFIPEHKPTDYKKENTGPLETRDYPQNSLFDNTTVVYIPDLNTGYKPQISNFLPEGSHLSNNNEITSLTLKPPVDSLDSGNNPRLQKHPNFAFSVSSVNSLSNTIFLGELSLILNQGECSSPDIQNSVEEETTMLLENDSPSETIPEQTLLPDEFVSCLGIVNEELPSINTYFPQNILESHFNRISLLEK

SEQ ID NO: 317 - protein, 277 aa, Homo sapiens
NKRDLIKKHIWPNVPDPSKSHIAQWSPHTPPRHNFNSKDQMYSDGNFTDVSVVEIEANDKKPFPEDLKSLDLFKKEKINTEGHSSGIGGSSCMSSSRPSISSSDENESSQNTSSTVQYSTVVHSGYRHQVPSVQVFSRSESTQPLLDSEERPEDLQLVDHVDGGDGILPRQQYFKQNCSQHESSPDISHFERSKQVSSVNEEDFVRLKQQISDHISQSCGSGQMKMFQEVSAADAFGPGTEGQVERFETVGMEAATDEGMPKSYLPQTVRQGGYMPQ

SEQ ID NO: 318 - protein, 39 aa, Homo sapiens
KSRQTPPLASVEMEAMEALPVTWGTSSRDEDLENCSHHL

SEQ ID NO: 319 - protein, 662 aa, Homo sapiens
MEPLVTWVVPLLFLFLLSRQGAACRTSECCFQDPPYPDADSGSASGPRDLRCYRISSDRYECSWQYEGPTAGVSHFLRCCLSSGRCCYFAAGSATRLQFSDQAGVSVLYTVTLWVESWARNQTEKSPEVTLQLYNSVKYEPPLGDIKVSKLAGQLRMEWETPDNQVGAEVQFRHRTPSSPWKLGDCGPQDDDTESCLCPLEMNVAQEFQLRRRQLGSQGSSWSKWSSPVCVPPENPPQPQVRFSVEQLGQDGRRRLTLKEQPTQLELPEGCQGLAPGTEVTYRLQLHMLSCPCKAKATRTLHLGKMPYLSGAAYNVAVISSNQFGPGLNQTWHIPADTHTEPVALNISVGTNGTTMYWPARAQSMTYCIEWQPVGQDGGLATCSLTAPQDPDPAGMATYSWSRESGAMGQEKCYYITIFASAHPEKLTLWSTVLSTYHFGGNASAAGTPHHVSVKNHSLDSVSVDWAPSLLSTCPGVLKEYVVRCRDEDSKQVSEHPVQPTETQVTLSGLRAGVAYTVQVRADTAWLRGVWSQPQRFSIEVQVSDWLIFFASLGSFLSILLVGVLGYLGLNRAARHLCPPLPTPCASSAIEFPGGKETWQWINPVDFQEEASLQEALVVEMSWDKGERTEPLEKTELPEGAPELALDTELSLEDGDRCKAKM

SEQ ID NO: 320 - protein, 373 aa, Artificial Sequence
  Synthesized
KRGRKKLLYIFKQPFMRPVQTTQEEDGCSCRFPEEEEGGCELRVKFSRSADAPAYQQGQNQLYNELNLGRREEYDVLDKRRGRDPEMGGKPRRKNPQEGLYNELQKDKMAEAYSEIGMKGERRRGKGHDGLYQGLSTATKDTYDALHMQALPPRHYFQQKVFVLLAALRPQWCSREIPDPANSTCAKKYPIAEEKTQLPLDRLLIDWPTPEDPEPLVISEVLHQVTPVFRHPPCSNWPQREKGIQGHQASEKDMMHSASSPPPPRALQAESRQLVDLYKVLESRGSDPKPENPACPWTVLPAGDLPTHDGYLPSNIDDLPSHEAPLADSLEELEPQHISLSVFPSSSLHPLTFSCGDKLTLDQLKMRCDSLML

SEQ ID NO: 321 - protein, 373 aa, Artificial Sequence
  Synthesized
KRGRKKLLYIFKQPFMRPVQTTQEEDGCSCRFPEEEEGGCELHYFQQKVFVLLAALRPQWCSREIPDPANSTCAKKYPIAEEKTQLPLDRLLIDWPTPEDPEPLVISEVLHQVTPVFRHPPCSNWPQREKGIQGHQASEKDMMHSASSPPPPRALQAESRQLVDLYKVLESRGSDPKPENPACPWTVLPAGDLPTHDGYLPSNIDDLPSHEAPLADSLEELEPQHISLSVFPSSSLHPLTFSCGDKLTLDQLKMRCDSLMLRVKFSRSADAPAYQQGQNQLYNELNLGRREEYDVLDKRRGRDPEMGGKPRRKNPQEGLYNELQKDKMAEAYSEIGMKGERRRGKGHDGLYQGLSTATKDTYDALHMQALPPR

SEQ ID NO: 322 - protein, 373 aa, Artificial Sequence
  Synthesized
HYFQQKVFVLLAALRPQWCSREIPDPANSTCAKKYPIAEEKTQLPLDRLLIDWPTPEDPEPLVISEVLHQVTPVFRHPPCSNWPQREKGIQGHQASEKDMMHSASSPPPPRALQAESRQLVDLYKVLESRGSDPKPENPACPWTVLPAGDLPTHDGYLPSNIDDLPSHEAPLADSLEELEPQHISLSVFPSSSLHPLTFSCGDKLTLDQLKMRCDSLMLKRGRKKLLYIFKQPFMRPVQTTQEEDGCSCRFPEEEEGGCELRVKFSRSADAPAYQQGQNQLYNELNLGRREEYDVLDKRRGRDPEMGGKPRRKNPQEGLYNELQKDKMAEAYSEIGMKGERRRGKGHDGLYQGLSTATKDTYDALHMQALPPR

SEQ ID NO: 323 - DNA, 1117 bp, Artificial Sequence
  Synthesized
aatgctttgtcctggagagctatcttaagggacaaaatcgttttcccagcgtcatctgtgacacatcctgacagtagagagctgcttccaagaagcaatttgaagtgccattatcaggcagggacgggggctctaggggatttcggggtcagcagatatgaaatgaatgatttcatagggctgtcacagagctgtggtgggaatttcccatgagaccccgcccctggctgagtcaccgcactcctgtgtttgacctgaagtcctctcgagctgcagaagcctgaagaccaaggagtggaaagttctccggcagccctgagatctcaaggtctgtccatctgggggagtgggtgggggcactgagaaggggtgagattggaacttttgctccctttgcccatttctagactttttctcctaatatgtaataacttctcttcaatagccctttaaataaacatcaataacttagcctgaagagtttttcactccttagttttgttaccatacaaacttcacatctcaaaacatgtctctgtttaagaaaatgtgttagtgagttgaacagggaggtctttccacatgttagtagttaggtgttcagctaaagggggaagagtgattatgtgatagcttcttcttgaactgaattgtctgatgcccctgacagattctctttgtaaggagtttatttcaggggcaataagtaattggcattattgctggttggtactgcaaagtacctatgaaagtccccaaaagttcttgctattgttatttctgcattttggcagaacatgatggaaaatgcaccctcaaactttggcaaaccggcacaaagctgtgtgtttaatcacgcctgccttgtcctagtggtttctatgaatctgctacttttccgtaatattgcatcattaattgttcctgaaaaaccctgagttatcctcttatagaattgtataagtaatgattgcaatatagataattttgaaaggagaaaccacctttccttggaaatgtttatcttttgcagagtgacatttgtgagaccagctaatttgattaaaattctcttggaatcagctttgctagtatcatacctgtgccagatttcatc

SEQ ID NO: 324 - DNA, 590 bp, Artificial Sequence
  Synthesized
agtgaggcggtacccacagagccgcgtggcactcctcaacctgctagagcagccggcctcctgcaggatggcttaaggaccacctggtccttggggtctgggttctccgggtcctgctgttccctgcagccttccttctacccccagagcagcttgggggcatctttagagaaagcggcagtgtcgcacctgccccagcagccacaaaacagaggaaattctgagcacctccgggcgtgagtcaccataccacattcaggaattgccacctctgcccacagaatcacccactcttttctgtttgggaccaaaatagatacctccttcagaagccgctgctttctgtactctcagcaataaaaaaacaaaggctaggataggtgtgtgcctctgaggcgtgagggggggcgcgttttctcccctgggaaggttttcagagagaagttgttgctacagcagtacaggcagctgatgggttgagggtacaggaggaagagggatggcctcggcggccaagcttagacactagagggtatataatggaagctcgacttccagcttggcaatccggtactgttggtaaagccacc

SEQ ID NO: 325 - DNA, 687 bp, Artificial Sequence
  Synthesized
tgagagaggatgatgtattctaaattgaagttttgattcacaagaagattaaaagccattcagaaacctaattcacccactgaaaggaaaaaaaaaaaagagagatgagcagtttgtctccggaaattgtcttaggtcggaagtctgtggtccctgttcacatgtacccaaaagcatcctgctgctgcagctgtctgataagcacagagtaccccaccttctctgcacactttgcatctagctcatattacctcatctttacttcctttctgacgtctcaccctggattctacatataaggtcacacaggaaggaaagctgcattgagttttggtgtcctgaaagacttttgccaaccttgtccccgcactaatttctctaagcctcggctatactattttctcagctacacgatgaaatgtgaatgataatttctgccctaaaaatatcacttaattttttaacatatcatttatgaaagaagacacataaaatgtctccctaaaatggaaagttacatattattgccatctgtgttttataaagaggttgaaaggggtggtacctgagctcgctagcctcgaggatatcaagatctggcctcggcggccaagcttagacactagagggtatataatggaagctcgacttccagcttggcaatccggtactgttggtaaagccacc

SEQ ID NO: 326 - DNA, 688 bp, Homo sapiens
tttctactgggcagtgctgatctagagcaatttgaaacttgtggtagatattttactaaccaactctgatgaaggacttcctcaccaaattgttcttttaaccgcattctttccttgctttctggtcatttgcaagaaaaattttaaaaggctgcccctttgtaaaggtttgagaggccctagaatttcgtttttcacttgttcccaaccacaagcaaatgatcaatgtgctttgtgaatgaagagtcaacattttaccagggcgaagtggggaggtacaaaaaaatttccagtccttgaatggtgtgaagtaaaagtgccttcaaagaatcccaccagaatggcacaggtgggcataatgggtctgtctcatcgtcaaaggacccaaggagtctaaaggaaactctaactacaacacccaaatgccacaaaaccttagttattaatacaaactatcatccctgcctatctgtcaccatctcatcttaaaaaacttgtgaaaatacgtaatcctcaggagacttcaattaggtataaataccagcagccagaggaggtgcagcacattgttctgatcatctgaagatcagctattagaagagaaagatcagttaagtcctttggacctgatcagcttgatacaagaactactgatttcaacttctttggcttaattctctcggaaacg

SEQ ID NO: 327 - DNA, 57 bp, Homo sapiens
gccacgaacttctctctgttaaagcaagcaggagacgtggaagaaaaccccggtcct

SEQ ID NO: 328 - protein, 166 aa, Homo sapiens
MKYTSYILAFQLCIVLGSLGCYCQDPYVKEAENLKKYFNAGHSDVADNGTLFLGILKNWKEESDRKIMQSQIVSFYFKLFKNFKDDQSIQKSVETIKEDMNVKFFNSNKKKRDDFEKLTNYSVTDLNVQRKAIHELIQVMAELSPAAKTGKRKRSQMLFRGRRASQ

SEQ ID NO: 329 - protein, 326 aa, Homo sapiens
EETRELQSLAAAVVPSAQTLKITDFSFSDFELSDLETALCTIRMFTDLNLVQNFQMKHEVLCRWILSVKKNYRKNVAYHNWRHAFNTAQCMFAALKAGKIQNKLTDLEILALLIAALSHDLDHRGVNNSYIQRSEHPLAQLYCHSIMEHHHFDQCLMILNSPGNQILSGLSIEEYKTTLKIIKQAILATDLALYIKRRGEFFELIRKNQFNLEDPHQKELFLAMLMTACDLSAITKPWPIQQRIAELVATEFFDQGDRERKELNIEPTDLMNREKKNKIPSMQVGFIDAICLQLYEALTHVSEDCFPLLDGCRKNRQKWQALAEQQ

SEQ ID NO: 330 - DNA, 76 bp, Homo sapiens
gtgactacgtgctgcctaggtgactacgtgctgcctaggtgactacgtgctgcctaggtgactacgtgctgcctag

SEQ ID NO: 331 - DNA, 72 bp, Homo sapiens
tgtcacgtcctgcacgactctagttgtcacgtcctgcacgactctagttgtcacgtcctgcacgacgctagc

SEQ ID NO: 332 - DNA, 277 bp, Homo sapiens
tcgaggtcgacggtatcgataagcttgatatcgaattaggaggaaaaactgtttcatacagaaggcgtcaattaggaggaaaaactgtttcatacagaaggcgtcaattaggaggaaaaactgtttcatacagaaggcgtcaattggtcccatcgaattaggaggaaaaactgtttcatacagaaggcgtcaattaggaggaaaaactgtttcatacagaaggcgtcaattaggaggaaaaactgtttcatacagaaggcgtcaattggtcccggga

SEQ ID NO: 333 - DNA, 90 bp, Homo sapiens
acgccttctgtatgaaacagtttttcctccacgccttctgtatgaaacagtttttcctccacgccttctgtatgaaacagtttttcctcc

SEQ ID NO: 334 - DNA, 99 bp, Homo sapiens
caaggtaaacaagagtaaacaagtcaaggtaaacaagagtaaacaagtccaaggtaaacaagagtaaacaagtccaaggtaaacaagagtaaacaagtc

SEQ ID NO: 335 - DNA, 54 bp, Homo sapiens
cagtacgtgcagtacgtgcagtacgtgcagtacgtgcagtacgtgcagtacgtg

SEQ ID NO: 336 - DNA, 92 bp, Homo sapiens
ggatctgcgatcgctgaattctggggactttccactggggactttccactggggactttccactggggactttccactggggactttccact

SEQ ID NO: 337 - DNA, 52 bp, Homo sapiens
gggaatttccggggactttccgggaatttccggggactttccgggaatttcc

SEQ ID NO: 338 - DNA, 84 bp, Homo sapiens
tacgctcgcttcgacagcggagactctagagggtatataatgggagctcgaattccagcttggcattccggtactgttggtaaa

SEQ ID NO: 339 - DNA, 108 bp, Homo sapiens
ctcgaggatatcaagatctggcctcggcggccaagcttagacactagagggtatataatggaagctcgacttccagcttggcaatccggtactgttggtaaagccacc

SEQ ID NO: 340 - DNA, 206 bp, Homo sapiens
tcgagatccggccccgcccagcgtcttgtcattggcgaattcgaacacgcagatgcagtcggggcggcgcggtccgaggtccacttcgcatattaaggtgacgcgtgtggcctcgaacaccgagcgaccctgcagcgacccgcttaacagcgtcaacagcgtgccgcagatctaagtaagcttggcattccggtactgttggtaaa

SEQ ID NO: 341 - DNA, 113 bp, Homo sapiens
cattttgacacccccataatatttttccagaattaacagtataaattgcatctcttgttcaagagttccctatcactctctttaatcactactcacagtaacctcaactcctg

SEQ ID NO: 342 - DNA, 115 bp, Homo sapiens
ggggatctggcgcggtcccaggtccacttcgcatattaaggtgacgcgtgtggcctcgaacaccgagcgaccctgcagcgacccgcaagcttggcattccggtactgttggtaaa

SEQ ID NO: 343 - DNA, 322 bp, Homo sapiens
ctttcaggtaggcctgtgcctttttcagcgggctgcagttctcctgcttggcttgagtcattcgcatttcctgagagctgggtagagggggagttgtggaggagcccattctgaaactgatctgatattgcaaacccatacacggaaaggaagaactgcccatacgtattcgagtcttccaatctgactccgagcccgcatccccctcaatcgtctcttttccccactccccagatcacggtgctgcttggtccccctcagagccatagagaagcagggggtgtggccatggaggggaaacctctgtcaccagagactttac

SEQ ID NO: 344 - DNA, 84 bp, Homo sapiens; identical to SEQ ID NO: 338

SEQ ID NO: 345 - DNA, 192 bp, Homo sapiens
cctgcagcagtggatattcccagaaaactttttggatgcagttggggatttcctctttactggatgtggacaatatcctcctattattcacaggaagcaatccctcctataaaagggcctcagcagaagtagtgttcagctgttcttggctgacttcacatcaaagcttctatactgacctgagacagagcc

SEQ ID NO: 346 - DNA, 95 bp, Homo sapiens
agatctggcctcggcggccaagcttagacactagagggtatataatggaagctcgacttccagcttggcaatccggtactgttggtaaagccacc

SEQ ID NO: 347 - protein, 233 aa, Homo sapiens
MSTESMIRDVELAEEALPKKTGGPQGSRRCLFLSLFSFLIVAGATTLFCLLHFGVIGPQREEFPRDLSLISPLAQAVRSSSRTPSDKPVAHVVANPQAEGQLQWLNRRANALLANGVELRDNQLVVPSEGLYLIYSQVLFKGQGCPSTHVLLTHTISRIAVSYQTKVNLLSAIKSPCQRETPEGAEAKPWYEPIYLGGVFQLEKGDRLSAEINRPDYLDFAESGQVYFGIIAL

SEQ ID NO: 348 - protein, 244 aa, Homo sapiens
MGALGLEGRGGRLQGRGSLLLAVAGATSLVTLLLAVPITVLAVLALVPQDQGGLVTETADPGAQAQQGLGFQKLPEEEPETDLSPGLPAAHLIGAPLKGQGLGWETTKEQAFLTSGTQFSDAEGLALPQDGLYYLYCLVGYRGRAPPGGGDPQGRSVTLRSSLYRAGGAYGPGTPELLLEGAETVTPVLDPARRQGYGPLWYTSVGFGGLVQLRRGERVYVNISHPDMVDFARGKTFFGAVMVG

SEQ ID NO: 349 - protein, 183 aa, Homo sapiens
MERVQPLEENVGNAARPRFERNKLLLVASVIQGLGLLLCFTYICLHFSALQVSHRYPRIQSIKVQFTEYKKEKGFILTSQKEDEIMKVQNNSVIINCDGFYLISLKGYFSQEVNISLHYQKDEEPLFQLKKVRSVNSLMVASLTYKDKVYLNVTTDNTSLDDFHVNGGELILIHQNPGEFCVL

SEQ ID NO: 350 - protein, 261 aa, Homo sapiens
MIETYNQTSPRSAATGLPISMKIFMYLLTVFLITQMIGSALFAVYLHRRLDKIEDERNLHEDFVFMKTIQRCNTGERSLSLLNCEEIKSQFEGFVKDIMLNKEETKKENSFEMQKGDQNPQIAAHVISEASSKTTSVLQWAEKGYYTMSNNLVTLENGKQLTVKRQGLYYIYAQVTFCSNREASSQAPFIASLCLKSPGRFERILLRAANTHSSAKPCGQQSIHLGGVFELQPGASVFVNVTDPSQVSHGTGFTSFGLLKL

SEQ ID NO: 351 - protein, 281 aa, Homo sapiens
MQQPFNYPYPQIYWVDSSASSPWAPPGTVLPCPTSVPRRPGQRRPPPPPPPPPLPPPPPPPPLPPLPLPPLKKRGNHSTGLCLLVMFFMVLVALVGLGLGMFQLFHLQKELAELRESTSQMHTASSLEKQIGHPSPPPEKKELRKVAHLTGKSNSRSMPLEWEDTYGIVLLSGVKYKKGGLVINETGLYFVYSKVYFRGQSCNNLPLSHKVYMRNSKYPQDLVMMEGKMMSYCTTGQMWARSSYLGAVFNLTSADHLYVNVSELSLVNFEESQTFFGLYKL

SEQ ID NO: 352 - protein, 193 aa, Homo sapiens
MPEEGSGCSVRRRPYGCVLRAALVPLVAGLVICLVVCIQRFAQAQQQLPLESLGWDVAELQLNHTGPQQDPRLYWQGGPALGRSFLHGPELDKGQLRIHRDGIYMVHIQVTLAICSSTTASRHHPTTLAVGICSPASRSISLLRLSFHQGCTIASQRLTPLARGDTLCTNLTGTLLPSRNTDETFFGVQWVRP

SEQ ID NO: 353 - protein, 234 aa, Homo sapiens
MDPGLQQALNGMAPPGDTAMHVPAGSVASHLGTTSRSYFYLTTATLALCLVFTVATIMVLVVQRTDSIPNSPDNVPLKGGNCSEDLLCILKRAPFKKSWAYLQVAKHLNKTKLSWNKDGILHGVRYQDGNLVIQFPGLYFIICQLQFLVQCPNNSVDLKLELLINKHIKKQALVTVCESGMQTKHVYQNLSQFLLDYLQVNTTISVNVDTFQYIDTSTFPLENVLSIFLYSNSD

SEQ ID NO: 354 - protein, 254 aa, Homo sapiens
MEYASDASLDPEAPWPPAPRARACRVLPWALVAGLLLLLLLAAACAVFLACPWAVSGARASPGSAASPRLREGPELSPDDPAGLLDLRQGMFAQLVAQNVLLIDGPLSWYSDPGLAGVSLTGGLSYKEDTKELVVAKAGVYYVFFQLELRRVVAGEGSGSVSLALHLQPLRSAAGAAALALTVDLPPASSEARNSAFGFQGRLLHLSAGQRLGVHLHTEARARHAWQLTQGATVLGLFRVTPEIPAGLPSPRSE

SEQ ID NO: 355 - protein, 281 aa, Homo sapiens [sequence omitted]

SEQ ID NO: 356 - protein, 317 aa, Homo sapiens
MRRASRDYTKYLRGSEEMGGGPGAPHEGPLHAPPPPAPHQPPAASRSMFVALLGLGLGQVVCSVALFFYFRAQMDPNRISEDGTHCIYRILRLHENADFQDTTLESQDTKLIPDSCRRIKQAFQGAVQKELQHIVGSQHIRAEKAMVDGSWLDLAKRSKLEAQPFAHLTINATDIPSGSHKVSLSSWYHDRGWAKISNMTFSNGKLIVNQDGFYYLYANICFRHHETSGDLATEYLQLMVYVTKTSIKIPSSHTLMKGGSTKYWSGNSEFHFYSINVGGFFKLRSGEEISIEVSNPSLLDPDQDATYFGAFKVRDID

SEQ ID NO: 357 - protein, 249 aa, Homo sapiens
MAARRSQRRRGRRGEPGTALLVPLALGLGLALACLGLLLAVVSLGSRASLSAQEPAQEELVAEEDQDPSELNPQTEESQDPAPFLNRLVRPRRSAPKGRKTRARRAIAAHYEVHPRPGQDGAQAGVDGTVSGWEEARINSSSPLRYNRQIGEFIVTRAGLYYLYCQVHFDEGKAVYLKLDLLVDGVLALRCLEEFSATAASSLGPQLRLCQVSGLLALRPGSSLRIRTLPWAHLKAAPFLTYFGLFQVH

SEQ ID NO: 358 - protein, 250 aa, Homo sapiens [sequence omitted]

SEQ ID NO: 359 - protein, 240 aa, Homo sapiens
MEESVVRPSVFVVDGQTDIPFTRLGRSHRRQSCSVARVGLGLLLLLMGAGLAVQGWFLLQLHWRLGEMVTRLPDGPAGSWEQLIQERRSHEVNPAAHLTGANSSLTGSGGPLLWETQLGLAFLRGLSYHDGALVVTKAGYYYIYSKVQLGGVGCPLGLASTITHGLYKRTPRYPEELELLVSQQSPCGRATSSSRVWWDSSFLGGVVHLEAGEKVVVRVLDERLVRLRDGTRSYFGAFMV

SEQ ID NO: 360 - protein, 241 aa, Homo sapiens
MSMLFYTLITAFLIGIQAEPHSESNVPAGHTIPQAHWTKLQHSLDTALRRARSAPAAAIAARVAGQTRNITVDPRLFKKRRLRSPRVLFSTQPPREAADTQDLDFEVGGAAPFNRTHRSKRSSSHPIFHRGEFSVCDSVSVWVGDKTTATDIKGKEVMVLGEVNINNSVFKQYFFETKCRDPNPVDSGCRGIDSKHWNSYCTTTHTFVKALTMDGKQAAWRFIRIDTACVCVLSRKAVRRA

SEQ ID NO: 361 - protein, 199 aa, Homo sapiens
MTLHPSPITCEFLFSTALISPKMCLSHLENMPLSHSRTQGAQRSSWKLWLFCSIVMLLFLCSFSWLIFIFLQLETAKEPCMAKFGPLPSKWQMASSEPPCVNKVSDWKLEILQNGLYLIYGQVAPNANYNDVAPFEVRLYKNKDMIQTLTNKSKIQNVGGTYELHVGDTIDLIFNSEHQVLKNNTYWGIILLANPQFIS

SEQ ID NO: 362 - protein, 251 aa, Homo sapiens
MAEDLGLSFGETASVEMLPEHGSCRPKARSSSARWALTCCLVLLPFLAGLTTYLLVSQLRAQGEACVQFQALKGQEFAPSHQQVYAPLRADGDKPRAHLTVVRQTPTQHFKNQFPALHWEHELGLAFTKNRMNYTNKFLLIPESGDYFIYSQVTFRGMTSECSEIRQAGRPNKPDSITVVITKVTDSYPEPTQLLMGTKSVCEVGSNWFQPIYLGAMFSLQEGDKLMVNVSDISLVDYTKEDKTFFGAFLL

SEQ ID NO: 363 - protein, 391 aa, Homo sapiens
MGYPEVERRELLPAAAPRERGSQGCGCGGAPARAGEGNSCLLFLGFFGLSLALHLLTLCCYLELRSELRRERGAESRLGGSGTPGTSGTLSSLGGLDPDSPITSHLGQPSPKQQPLEPGEAALHSDSQDGHQMALLNFFFPDEKPYSEEESRRVRRNKRSKSNEGADGPVKNKKKGKKAGPPGPNGPPGPPGPPGPQGPPGIPGIPGIPGTTVMGPPGPPGPPGPQGPPGLQGPSGAADKAGTRENQPAVVHLQGQGSAIQVKNDLSGGVLNDWSRITMNPKVFKLHPRSGELEVLVDGTYFIYSQVEVYYINFTDFASYEVVVDEKPFLQCTRSIETGKTNYNTCYTAGVCLLKARQKIAVKMVHADISINMSKHTTFFGAIRLGEAPAS

SEQ ID NO: 364 - protein, 107 aa, Homo sapiens
MARAALSAAPSNPRLLRVALLLLLLVAAGRRAAGASVATELRCQCLQTLQGIHPKNIQSVNVKSPGPHCAQTEVIATLKNGRKACLNPASPIVKKIIEKMLNSDKSN

SEQ ID NO: 365 - protein, 107 aa, Homo sapiens
MARATLSAAPSNPRLLRVALLLLLLVAASRRAAGAPLATELRCQCLQTLQGIHLKNIQSVKVKSPGPHCAQTEVIATLKNGQKACLNPASPMVKKIIEKMLKNGKSN

SEQ ID NO: 366 - protein, 107 aa, Homo sapiens
MAHATLSAAPSNPRLLRVALLLLLLVAASRRAAGASVVTELRCQCLQTLQGIHLKNIQSVNVRSPGPHCAQTEVIATLKNGKKACLNPASPMVQKIIEKILNKGSTN

SEQ ID NO: 367 - protein, 101 aa, Homo sapiens
MSSAAGFCASRPGLLFLGLLLLPLVVAFASAEAEEDGDLQCLCVKTTSQVRPRHITSLEVIKAGPHCPTAQLIATLKNGRKICLDLQAPLYKKIIKKLLES

SEQ ID NO: 368 - protein, 114 aa, Homo sapiens
MSLLSSRAARVPGPSSSLCALLVLLLLLTQPGPIASAGPAAAVLRELRCVCLQTTQGVHPKMISNLQVFAIGPQCSKVEVVASLKNGKEICLDPEAPFLKKVIQKILDGGNKEN

SEQ ID NO: 369 - protein, 114 aa, Homo sapiens; identical to SEQ ID NO: 368

SEQ ID NO: 370 - protein, 128 aa, Homo sapiens
MSLRLDTTPSCNSARPLHALQVLLLLSLLLTALASSTKGQTKRNLAKGKEESLDSDLYAELRCMCIKTTSGIHPKNIQSLEVIGKGTHCNQVEVIATLKDGRKICLDPDAPRIKKIVQKKLAGDESAD

SEQ ID NO: 371 - protein, 99 aa, Homo sapiens
MTSKLAVALLAAFLISAALCEGAVLPRSAKELRCQCIKTYSKPFHPKFIKELRVIESGPHCANTEIIVKLSDGRELCLDPKENWVQRVVEKFLKRAENS

SEQ ID NO: 372 - protein, 125 aa, Homo sapiens
MKKSGVLFLLGIILLVLIGVQGTPVVRKGRCSCISTNQGTIHLQSLKDLKQFAPSPSCEKIEIIATLKNGVQTCLNPDSADVKELIKKWEKQVSQKKKQKNGKKHQKKKVLKVRKSQRSRQKKTT

SEQ ID NO: 373 - protein, 98 aa, Homo sapiens
MNQTAILICCLIFLTLSGIQGVPLSRTVRCTCISISNQPVNPRSLEKLEIIPASQFCPRVEIIATMKKKGEKRCLNPESKAIKNLLKAVSKERSKRSP

SEQ ID NO: 374 - protein, 94 aa, Homo sapiens
MSVKGMAIALAVILCATVVQGFPMFKRGRCLCIGPGVKAVKVADIEKASIMYPSNNCDKIEVIITLKENKGQRCLNPKSKQARLIIKKVERKNF

SEQ ID NO: 375 - protein, 93 aa, Homo sapiens
MNAKVVVVLVLVLTALCLSDGKPVSLSYRCPCRFFESHVARANVKHLKILNTPNCALQIVARLKNNNRQVCIDPKLKWIQEYLEKALNKRFKM

SEQ ID NO: 376 - protein, 109 aa, Homo sapiens
MKFISTSLLLMLLVSSLSPVQGVLEVYYTSLRCRCVQESSVFIPRRFIDRIQILPRGNGCPRKEIIVWKKNKSIVCVDPQAEWIQRMMEVLRKRSSSTLPVPVFKRKIP

SEQ ID NO: 377 - protein, 111 aa, Homo sapiens
MSLLPRRAPPVSMRLLAAALLLLLLALYTARVDGSKCKCSRKGPKIRYSDVKKLEMKPKYPHCEEKMVIITTKSVSRYRGQEHCLHPKLQSTKRFIKWYNAWNEKRRVYEE

SEQ ID NO: 378 - protein, 96 aa, Homo sapiens
MQIITTALVCLLLAGMWPEDVDSKSMQVPFSRCCFSFAEQEIPLRAILCYRNTSSICSNEGLIFKLKRGKEACALDTVGWVQRHRKMLRHCPSKRK

SEQ ID NO: 379 - protein, 99 aa, Homo sapiens
MKVSAALLCLLLIAATFIPQGLAQPDAINAPVTCCYNFTNRKISVQRLASYRRITSSKCPKEAVIFKTIVAKEICADPKQKWVQDSMDHLDKQTQTPKT

SEQ ID NO: 380 - protein, 92 aa, Homo sapiens
MQVSTAALAVLLCTMALCNQFSASLAADTPTACCFSYTSRQIPQNFIADYFETSSQCSKPGVIFLTKRSRQVCADPSEEWVQKYVSDLELSA

SEQ ID NO: 381 - protein, 93 aa, Homo sapiens
MQVSTAALAVLLCTMALCNQVLSAPLAADTPTACCFSYTSRQIPQNFIADYFETSSQCSKPSVIFLTKRGRQVCADPSEEWVQKYVSDLELSA

SEQ ID NO: 382 - protein, 92 aa, Homo sapiens
MKLCVTVLSLLMLVAAFCSPALSAPMGSDPPTACCFSYTARKLPRNFVVDYYETSSLCSQPAVVFQTKRSKQVCADPSESWVQEYVYDLELN

SEQ ID NO: 383 - protein, 91 aa, Homo sapiens
MKVSAAALAVILIATALCAPASASPYSSDTTPCCFAYIARPLPRAHIKEYFYTSGKCSNPAVVFVTRKNRQVCANPEKKWVREYINSLEMS

SEQ ID NO: 384 - protein, 99 aa, Homo sapiens
MKASAALLCLLLTAAAFSPQGLAQPVGINTSTTCCYRFINKKIPKQRLESYRRTTSSHCPREAVIFKTKLDKEICADPTQKWVQDFMKHLDKKTQTPKL

SEQ ID NO: 385 - protein, 99 aa, Homo sapiens
MKVSAALLCLLLMAATFSPQGLAQPDSVSIPITCCFNVINRKIPIQRLESYTRITNIQCPKEAVIFKTKRGKEVCADPKERWVRDSMKHLDQIFQNLKP

SEQ ID NO: 386 - protein, 97 aa, Homo sapiens
MKVSAALLWLLLIAAAFSPQGLAGPASVPTTCCFNLANRKIPLQRLESYRRITSGKCPQKAVIFKTKLAKDICADPKKKWVQDSMKYLDQKSPTPKP

SEQ ID NO: 387 - protein, 98 aa, Homo sapiens
MKVSAVLLCLLLMTAAFNPQGLAQPDALNVPSTCCFTFSSKKISLQRLKSYVITTSRCPQKAVIFRTKLGKEICADPKEKWVQNYMKHLGRKAHTLKT

SEQ ID NO: 388 - protein, 93 aa, Homo sapiens
MKISVAAIPFFLLITIALGTKTESSSRGPYHPSECCFTYTTYKIPRQRIMDYYETNSQCSKPGIVFITKRGHSVCTNPSDKWVQDYIKDMKEN

SEQ ID NO: 389 - protein, 113 aa, Homo sapiens
MKVSVAALSCLMLVAVLGSQAQFINDAETELMMSKLPLENPVVLNSFHFAADCCTSYISQSIPCSLMKSYFETSSECSKPGVIFLTKKGRQVCAKPSGPGVQDCMKKLKPYSI

SEQ ID NO: 390 - protein, 120 aa, Homo sapiens
MKVSEAALSLLVLILIITSASRSQPKVPEWVNTPSTCCLKYYEKVLPRRLVVGYRKALNCHLPAIIFVTKRNREVCTNPNDDWVQEYIKDPNLPLLPTRNLSTVKIITAKNGQPQLLNSQ

SEQ ID NO: 391 - protein, 94 aa, Homo sapiens
MAPLKMLALVTLLLGASLQHIHAARGTNVGRECCLEYFKGAIPLRKLKTWYQTSEDCSRDAIVFVTVQGRAICSDPNNKRVKNAVKYLQSLERS

SEQ ID NO: 392 - protein, 89 aa, Homo sapiens
MKGLAAALLVLVCTMALCSCAQVGTNKELCCLVYTSWQIPQKFIVDYSETSPQCPKPGVILLTKRGRQICADPNKKWVQKYISDLKLNA

SEQ ID NO: 393 - protein, 98 aa, Homo sapiens
MALLLALSLLVLWTSPAPTLSGTNDAEDCCLSVTQKPIPGYIVRNFHYLLIKDGCRVPAVVFTTLRGRQLCAPPDQPWVERIIQRLQRTSAKMKRRSS

SEQ ID NO: 394 - protein, 96 aa, Homo sapiens
MCCTKSLLLAALMSVLLLHLCGESEAASNFDCCLGYTDRILHPKFIVGFTRQLANEGCDINAIIFHTKKKLSVCANPKQTWVKYIVRLLSKKVKNM

SEQ ID NO: 395 - protein, 134 aa, Homo sapiens
MAQSLALSLLILVLAFGIPRTQGSDGGAQDCCLKYSQRKIPAKVVRSYRKQEPSLGCSIPAILFLPRKRSQAELCADPKELWVQQLMQHLDKTPSPQKPAQGCRKDRGASKTGKKGKGSKGCKRTERSQTPKGP

SEQ ID NO: 396 - protein, 93 aa, Homo sapiens
MDRLQTALLVVLVLLAVALQATEAGPYGANMEDSVCCRDYVRYRLPLRVVKHFYWTSDSCPRPGVVLLTFRDKEICADPRVPWVKMILNKLSQ

SEQ ID NO: 397 - protein, 120 aa, Homo sapiens
MKVSVAALSCLMLVTALGSQARVTKDAETEFMMSKLPLENPVLLDRFHATSADCCISYTPRSIPCSLLESYFETNSECSKPGVIFLTKKGRRFCANPSDKQVQVCVRMLKLDTRIKTRKN

SEQ ID NO: 398 - protein, 119 aa, Homo sapiens
MAGLMTIVTSLLFLGVCAHHIIPTGSVVIPSPCCMFFVSKRIPENRVVSYQLSSRSTCLKAGVIFTTKKGQQFCGDPKQEWVQRYMKNLDAKQKKASPRARAVAVKGPVQRYPGNQTTC

SEQ ID NO: 399 - protein, 150 aa, Homo sapiens
MNLWLLACLVAGFLGAWAPAVHTQGVFEDCCLAYHYPIGWAVLRRAWTYRIQEVSGSCNLPAAIFYLPKRHRKVCGNPKSREVQRAMKLLDARNKVFAKLHHNTQTFQAGPHAVKKLSSGNSKLSSSKFSNPISSSKRNVSLLISANSGL

SEQ ID NO: 400 - protein, 94 aa, Homo sapiens
MMGLSLASAVLLASLLSLHLGTATRGSDISKTCCFQYSHKPLPWTWVRSYEFTSNSCSQRAVIFTTKRGKKVCTHPRKKWVQKYISLLKTPKQL

SEQ ID NO: 401 - protein, 112 aa, Homo sapiens
MKGPPTFCSLLLLSLLLSPDPTAAFLLPPSTACCTQLYRKPLSDKLLRKVIQVELQEADGDCHLQAFVLHLAQRSICIHPQNPSLSQWFEHQERKLHGTLPKLNFGMLRKMG

SEQ ID NO: 402 - protein, 127 aa, Homo sapiens
MQQRGLAIVALAVCAALHASEAILPIASSCCTEVSHHISRRLLERVNMCRIQRADGDCDLAAVILHVKRRRICVSPHNHTVKQWMKVQAAKKNGKGNVCHRKKHHGKRNSNRAHQGKHETYGHKTPY

SEQ ID NO: 403 - protein, 114 aa, Homo sapiens
MRLLILALLGICSLTAYIVEGVGSEVSDKRTCVSLTTQRLPVSRIKTYTITEGSLRAVIFITKRGLKVCADPQATWVRDVVRSMDRKSNTRNNMIQTKPTGTQQSTNTAVTLTG

SEQ ID NO: 404 - protein, 397 aa, Homo sapiens
MAPISLSWLLRLATFCHLTVLLAGQHHGVTKCNITCSKMTSKIPVALLIHYQQNQASCGKRAIILETRQHRLFCADPKEQWVKDAMQHLDRQAAALTRNGGTFEKQIGEVKPRTTPAAGGMDESVVLEPEATGESSSLEPTPSSQEAQRALGTSPELPTGVTGSSGTRLPPTPKAQDGGPVGTELFRVPPVSTAATWQSSAPHQPGPSLWAEAKTSEAPSTQDPSTQASTASSPAPEENAPSEGQRVWGQGQSPRPENSLEREEMGPVPAHTDAFQDWGPGSMAHVSVVPVSSEGTPSREPVASGSWTPKAEEPIHATMDPQRLGVLITPVPDAQAATRRQAVGLLAFLGLLFCLGVAMFTYQSLQGCPRKMAGEMAEGLRYIPRSCGSNSYVLVPV

SEQ ID NO: 405 - protein, 302 aa, Homo sapiens
MRLGSPGLLFLLFSSLRADTQEKEVRAMVGSDVELSCACPEGSRFDLNDVYVYWQTSESKTVVTYHIPQNSSLENVDSRYRNRALMSPAGMLRGDFSLRLFNVTPQDEQKFHCLVLSQSLGFQEVLSVEVTLHVAANFSVPVVSAPHSPSQDELTFTCTSINGYPRPNVYWINKTDNSLLDQALQNDTVFLNMRGLYDVVSVLRIARTPSVNIGCCIENVLLQQNLTVGSQTGNDIGERDKITENPVSTGEKNAATWSILAVLCLLVVVAVAIGWVCRDRCLQHSYAGAWAVSPETELTGHV

SEQ ID NO: 406 - protein, 288 aa, Homo sapiens
MGHTRRQGTSPSKCPYLNFFQLLVLAGLSHFCSGVIHVTKEVKEVATLSCGHNVSVEELAQTRIYWQKEKKMVLTMMSGDMNIWPEYKNRTIFDITNNLSIVILALRPSDEGTYECVVLKYEKDAFKREHLAEVTLSVKADFPTPSISDFEIPTSNIRRIICSTSGGFPEPHLSWLENGEELNAINTTVSQDPETELYAVSSKLDFNMTTNHSFMCLIKYGHLRVNQTFNWNTTKQEHFPDNLLPSWAITLISVNGIFVICCLTYCFAPRCRERRRNERLRRESVRPV

SEQ ID NO: 407 - protein, 329 aa, Homo sapiens
MDPQCTMGLSNILFVMAFLLSGAAPLKIQAYFNETADLPCQFANSQNQSLSELVVFWQDQENLVLNEVYLGKEKFDSVHSKYMGRTSFDSDSWTLRLHNLQIKDKGLYQCIIHHKKPTGMIRIHQMNSELSVLANFSQPEIVPISNITENVYINLTCSSIHGYPEPKKMSVLLRTKNSTIEYDGVMQKSQDNVTELYDVSISLSVSFPDVTSNMTIFCILETDKTRLLSSPFSIELEDPQPPPDHIPWITAVLPTVIICVMVFCLILWKWKKKKRPRNSYKCGTNTMEREESEQTKKREKIHIPERSDEAQRVFKSSKTSSCDKSDTCF

SEQ ID NO: 408 - protein, 365 aa, Artificial Sequence
  Synthesized
PGWFLDSPDRPWNPPTFSPALLVVTEGDNATFTCSFSNTSESFVLNWYRMSPSNQTDKLAAFPEDRSQPGQDCRFRVTQLPNGRDFHMSVVRARRNDSGTYLCGAISLAPKAQIKESLRAELRVTERRAEVPTAHPSPSPRPAGQFQTLVVGVVGGLLGSLVLLVWVLAVICSRAARGTIGARRTGQPLKEDPSAVPVFSVDYGELDFQWREKTPEPPVPCVPEQTEYATIVFPSGMGTSSPARRGSADGPRSAQPLRPEDGHCSWPLCSRAARGTIGARRTGQPLKEDPSAVPVFSVDYGELDFQWREKTPEPPVPCVPEQTEYATIVFPSGMGTSSPARRGSADGPRSAQPLRPEDGHCSWPL

SEQ ID NO: 409 - protein, 272 aa, Artificial Sequence
  Synthesized
FTVTVPKDLYVVEYGSNMTIECKFPVEKQLDLAALIVYWEMEDKNIIQFVHGEEDLKVQHSSYRQRARLLKDQLSLGNAALQITDVKLQDAGVYRCMISYGGADYKRITVKVNAPYNKINQRILVVDPVTSEHELTCQAEGYPKAEVIWTSSDHQVLSGKTTTTNSKREEKLFNVTSTLRINTTTNEIFYCTFRRLDPEENHTAELVIPELPLAHPPNERTHLVILGAILLCLGVALTFIFRLRKGRMMDVKKCGIQDTNSKKQSDTHLEET

SEQ ID NO: 410 - protein, 240 aa, Artificial Sequence
  Synthesized
DIVMTQSHKFMSTSIGARVSITCKASQDVRTAVAWYQQKPGQSPKLLIYSASYRYTGVPDRFTGSGSGTDFTFTISSVQAEDLAVYYCQQHYGTPPWTFGGGTKLEIKGGGGSGGGGSGGGGSEVQLVESGGGLVKPGGSLKLSCEASRFTFSSYAMSWVRQTPEKRLEWVAAISGGGRYTYYPDSMKGRFTISRDNAKNFLYLQMSSLRSEDTAMYYCARHYDGYLDYWGQGTTLTVSS

SEQ ID NO: 411 - protein, 238 aa, Artificial Sequence
  Synthesized
DIVMTQSHKFMSTSIGARVSITCKASQDVRTAVAWYQQKPGQSPKWYSASYRYTGVPDRFTGSGSGTDFTFTISSVQAEDLAVYYCQQHYGTPPWTFGGGTKLEIKGGGGSGGGGSGGGGSEVQLVESGGGLVKPGGSLKLSCEASRFTFSSYAMSWVRQTPEKRLEWVAAISGGGRYTYYPDSMKGRFTISRDNAKNFLYLQMSSLRSEDTAMYYCARHYDGYLDYWGQGTTLTVSS

SEQ ID NO: 412 - protein, 244 aa, Artificial Sequence
  Synthesized
EVQLVESGGGLVQPGGSLRLSCAASGFTFSSFGMHWVRQAPGKGLEWVAYISSDSSAIYYADTVKGRFTISRDNAKNSLYLQMNSLRDEDTAVYYCGRGRENIYYGSRLDYWGQGTTVTVSSGGGGSGGGGSGGGGSDIQLTQSPSFLSASVGDRVTITCKASQNVDTNVAWYQQKPGKAPKALIYSASYRYSGVPSRFSGSGSGTDFTLTISSLQPEDFATYYCQQYNNYPFTFGQGTKLEIK

SEQ ID NO: 413 - protein, 219 aa, Homo sapiens
ELCDDDPPEIPHATFKAMAYKEGTMLNCECKRGFRRIKSGSLYMLCTGNSSHSSWDNQCQCTSSATRNTTKQVTPQPEEQKERKTTEMQSPMQPVDQASLPGHCREPPPWENEATERIYHFVVGQMVYYQCVQGYRALHRGPAESVCKMTHGKTRWTQPQLICTGEMETSQFPGEEKPQASPEGRPESETSCLVTTTDFQIQTEMAATMETSIFTTEYQ

SEQ ID NO: 414 - protein, 19 aa, Homo sapiens
VAVAGCVFLLISVLLLSGL

SEQ ID NO: 415 - protein, 13 aa, Homo sapiens
TWQRRQRKSRRTI

SEQ ID NO: 416 - protein, 346 aa, Homo sapiens
LAPRRCPAQEVARGVLTSLPGDSVTLTCPGVEPEDNATVHWVLRKPAAGSHPSRWAGMGRRLLLRSVQLHDSGNYSCYRAGRPAGTVHLLVDVPPEEPQLSCFRKSPLSNVVCEWGPRSTPSLTTKAVLLVRKFQNSPAEDFQEPCQYSQESQKFSCQLAVPEGDSSFYIVSMCVASSVGSKFSKTQTFQGCGILQPDPPANITVTAVARNPRWLSVTWQDPHSWNSSFYRLRFELRYRAERSKTFTTWMVKDLQHHCVIHDAWSGLRHVVQLRAQEEFGQGEWSEWSPEAMGTPWTESRSPPAENEVSTPMQALTTNKDDDNILFRDSANATSLPVQDSSSVPLP

SEQ ID NO: 417 - protein, 21 aa, Homo sapiens
TFLVAGGSLAFGTLLCIAIVL

SEQ ID NO: 418 - protein, 82 aa, Homo sapiens
RFKKTWKLRALKEGKTSMHPPYSLGQLVPERPRPTPVLVPLISPPVSPSSLGSDNTSSHNRPDARDPRSPYDISNTDYFFPR

SEQ ID NO: 419 - protein, 219 aa, Homo sapiens
ESGYAQNGDLEDAELDDYSFSCYSQLEVNGSQHSLTCAFEDPDVNITNLEFEICGALVEVKCLNFRKLQEIYFIETKKFLLIGKSNICVKVGEKSLTCKKIDLTTIVKPEAPFDLSVVYREGANDFVVTFNTSHLQKKYVKVLMHDVAYRQEKDENKWTHVNLSSTKLTLLQRKLQPAAMYEIKVRSIPDHYFKGFWSEWSPSYYFRTPEINNSSGEMD

SEQ ID NO: 420 - protein, 25 aa, Homo sapiens
PILLTISILSFFSVALLVILACVLW

SEQ ID NO: 421 - protein, 195 aa, Homo sapiens
KKRIKPIVWPSLPDHKKTLEHLCKKPRKNLNVSFNPESFLDCQIHRVDDIQARDEVEGFLQDTFPQQLEESEKQRLGGDVQSPNCPSEDVVITPESFGRDSSLTCLAGNVSACDAPILSSSRSLDCRESGKNGPHVYQDLLLSLGTTNSTLPPPFSLQSGILTLNPVAQGQPILTSLGSNQEEAYVTMSSFYQNQ

SEQ ID NO: 422 - protein, 522 aa, Homo sapiens
CRTSECCFQDPPYPDADSGSASGPRDLRCYRISSDRYECSWQYEGPTAGVSHFLRCCLSSGRCCYFAAGSATRLQFSDQAGVSVLYTVTLWVESWARNQTEKSPEVTLQLYNSVKYEPPLGDIKVSKLAGQLRMEWETPDNQVGAEVQFRHRTPSSPWKLGDCGPQDDDTESCLCPLEMNVAQEFQLRRRQLGSQGSSWSKWSSPVCVPPENPPQPQVRFSVEQLGQDGRRRLTLKEQPTQLELPEGCQGLAPGTEVTYRLQLHMLSCPCKAKATRTLHLGKMPYLSGAAYNVAVISSNQFGPGLNQTWHIPADTHTEPVALNISVGTNGTTMYWPARAQSMTYCIEWQPVGQDGGLATCSLTAPQDPDPAGMATYSWSRESGAMGQEKCYYITIFASAHPEKLTLWSTVLSTYHFGGNASAAGTPHHVSVKNHSLDSVSVDWAPSLLSTCPGVLKEYVVRCRDEDSKQVSEHPVQPTETQVTLSGLRAGVAYTVQVRADTAWLRGVWSQPQRFSIEVQVSD

SEQ ID NO: 423 - protein, 25 aa, Homo sapiens
WLIFFASLGSFLSILLVGVLGYLGL

SEQ ID NO: 424 - protein, 92 aa, Homo sapiens
NRAARHLCPPLPTPCASSAIEFPGGKETWQWINPVDFQEEASLQEALVVEMSWDKGERTEPLEKTELPEGAPELALDTELSLEDGDRCKAKM

SEQ ID NO: 425 - protein, 175 aa, Homo sapiens
ITCPPPMSVEHADIWVKSYSLYSRERYICNSGFKRKAGTSSLTECVLNKATNVAHWTTPSLKCIRDPALVHQRPAPPSTVTTAGVTPQPESLSPSGKEPAASSPSSNNTAATTAAIVPGSQLMPSKSPSTGTTEISSHESSHGTPSQTTAKNWELTASASHQPPGVYPQGHSDTT

SEQ ID NO: 426 - protein, 23 aa, Homo sapiens
VAISTSTVLLCGLSAVSLLACYL

SEQ ID NO: 427 - protein, 39 aa, Homo sapiens; identical to SEQ ID NO: 318

SEQ ID NO: 428 - protein, 213 aa, Homo sapiens
CPDLVCYTDYLQTVICILEMWNLHPSTLTLTWQDQYEELKDEATSCSLHRSAHNATHATYTCHMDVFHFMADDIFSVNITDQSGNYSQECGSFLLAESIKPAPPFNVTVTFSGQYNISWRSDYEDPAFYMLKGKLQYELQYRNRGDPWAVSPRRKLISVDSRSVSLLPLEFRKDSSYELQVRAGPMPGSSYQGTWSEWSDPVIFQTQSEELKE

SEQ ID NO: 429 - protein, 21 aa, Homo sapiens
GWNPHLLLLLLLVIVFIPAFW

SEQ ID NO: 430 - protein, 285 aa, Homo sapiens
SLKTHPLWRLWKKIWAVPSPERFFMPLYKGCSGDFKKWVGAPFTGSSLELGPWSPEVPSTLEVYSCHPPRSPAKRLQLTELQEPAELVESDGVPKPSFWPTAQNSGGSAYSEERDRPYGLVSIDTVTVLDAEGPCTWPCSCEDDGYPALDLDAGLEPSPGLEDPLLDAGTTVLSCGCVSAGSPGLGGPLGSLLDRLKPPLADGEDWAGGLPWGGRSPGGVSESEAGSPLAGLDMDTFDSGFVGSDCSSPVECDFTSPGDEGPPRSYLRQWVVIPPPLSSPGPQAS

SEQ ID NO: 431 - protein, 332 aa, Homo sapiens
GITNINCSGHIWVEPATIFKMGMNISIYCQAAIKNCQPRKLHFYKNGIKERFQITRINKTTARLWYKNFLEPHASMYCTAECPKHFQETLICGKDISSGYPPDIPDEVTCVIYEYSGNMTCTWNAGKLTYIDTKYVVHVKSLETEEEQQYLTSSYINISTDSLQGGKKYLVWVQAANALGMEESKQLQIHLDDIVIPSAAVISRAETINATVPKTIIYWDSQTTIEKVSCEMRYKATTNQTWNVKEFDTNFTYVQQSEFYLEPNIKYVFQVRCQETGKRYWQPWSSLFFHKTPETVPQVTSKAFQHDTWNSGLTVASISTGHLTSDNRGDIG

SEQ ID NO: 432 - protein, 21 aa, Homo sapiens
LLLGMIVFAVMLSILSLIGIF

SEQ ID NO: 433 - protein, 253 aa, Homo sapiens; identical to SEQ ID NO: 316

SEQ ID NO: 434 - protein, 22 aa, Homo sapiens
MALIVLGGVAGLLLFIGLGIFF

SEQ ID NO: 435 - protein, 40 aa, Homo sapiens
CVRCRHRRRQAERMSQIKRLLSEKKTCQCPHRFQKTCSPI

SEQ ID NO: 436 - protein, 21 aa, Homo sapiens
IYIWAPLAGTCGVLLLSLVIT

SEQ ID NO: 437 - protein, 32 aa, Homo sapiens
LYCNHRNRRRVCKCPRPVVKSGDKPSLSARYV

SEQ ID NO: 438 - protein, 21 aa, Homo sapiens
ILVIFSGMFLVFTLAGALFLH

SEQ ID NO: 439 - protein, 48 aa, Homo sapiens
QRRKYRSNKGESPVEPAEPCHYSCPREEEGSTIPIQEDYRKPEPACSP

SEQ ID NO: 440 - protein, 27 aa, Homo sapiens
FWVLVVVGGVLACYSLLVTVAFIIFWV

SEQ ID NO: 441 - protein, 41 aa, Homo sapiens
RSKRSRLLHSDYMNMTPRRPGPTRKHYQPYAPPRDFAAYRS

SEQ ID NO: 442 - protein, 27 aa, Homo sapiens
IISFFLALTSTALLFLLFFLTLRFSVV

SEQ ID NO: 443 - protein, 42 aa, Homo sapiens; identical to SEQ ID NO: 3

SEQ ID NO: 444 - protein, 21 aa, Homo sapiens
VGVVGGLLGSLVLLVWVLAVI

SEQ ID NO: 445 - protein, 97 aa, Homo sapiens
CSRAARGTIGARRTGQPLKEDPSAVPVFSVDYGELDFQWREKTPEPPVPCVPEQTEYATIVFPSGMGTSSPARRGSADGPRSAQPLRPEDGHCSWPL

SEQ ID NO: 446 - protein, 21 aa, Homo sapiens
THLVILGAILLCLGVALTFIF

SEQ ID NO: 447 - protein, 31 aa, Homo sapiens
RLRKGRMMDVKKCGIQDTNSKKQSDTHLEET

SEQ ID NO: 448 - protein, 153 aa, Homo sapiens; identical to SEQ ID NO: 285

SEQ ID NO: 449 - protein, 177 aa, Homo sapiens; identical to SEQ ID NO: 289

SEQ ID NO: 450 - protein, 219 aa, Homo sapiens
MCPARSLLLVATLVLLDHLSLARNLPVATPDPGMFPCLHHSQNLLRAVSNMLQKARQTLEFYPCTSEEIDHEDITKDKTSTVEACLPLELTKNESCLNSRETSFITNGSCLASRKTSFMMALCLSSIYEDLKMYQVEFKTMNAKLLMDPKRQIFLDQNMLAVIDELMQALNFNSETVPQKSSLEEPDFYKTKIKLCILLHAFRIRAVTIDRVMSYLNAS

SEQ ID NO: 451 - protein, 162 aa, Homo sapiens; identical to SEQ ID NO: 291

SEQ ID NO: 452 - protein, 155 aa, Homo sapiens
MERIVICLMVIFLGTLVHKSSSQGQDRHMIRMRQLIDIVDQLKNYVNDLVPEFLPAPEDVETNCEWSAFSCFQKAQLKSANTGNNERIINVSIKKLKRKPPSTNAGRRQKHRLTCPSCDSYEKKPPKEFLERFKSLLQKMIHQHLSSRTHGSEDS

SEQ ID NO: 453 - protein, 189 aa, Homo sapiens; identical to SEQ ID NO: 303

SEQ ID NO: 454 - protein, 270 aa, Homo sapiens
MKPKMKYSTNKISTAKWKNTASKALCFKLGKSQQKAKEVCPMYFMKLRSGLMIKKEACYFRRETTKRPSLKTGRKHKRHLVLAACQQQSTVECFAFGISGVQKYTRALHDSSITGISPITEYLASLSTYNDQSITFALEDESYEIYVEDLKKDEKKDKVLLSYYESQHPSNESGDGVDGKMLMVTLSPTKDFWLHANNKEHSVELHKCEKPLPDQAFFVLHNMHSNCVSFECKTDPGVFIGVKDNHLALIKVDSSENLCTENILFKLSET

SEQ ID NO: 455 - protein, 177 aa, Homo sapiens
GPQREEFPRDLSLISPLAQAVRSSSRTPSDKPVAHVVANPQAEGQLQWLNRRANALLANGVELRDNQLVVPSEGLYLIYSQVLFKGQGCPSTHVLLTHTISRIAVSYQTKVNLLSAIKSPCQRETPEGAEAKPWYEPIYLGGVFQLEKGDRLSAEINRPDYLDFAESGQVYFGIIAL

SEQ ID NO: 456 - protein, 166 aa, Artificial Sequence
  Synthesized
MKYTSYILAFQLCIVLGSLGCYCQDPYVKEAENLKKYFNAGHSDVADNGTLFLGILKNWKEESDRKIMQSQIVSFYFKLFKNFKDDQSIQKSVETIAYDMNVKFFRSNKKKRDDFEKLTNYSVTDLNVQRKAIHELIQVMAELSPAAKTGKRKRSQMLFRGRRASQ

SEQ ID NO: 457 - protein, 74 aa, Homo sapiens
GIIQHDLIFSLQQTECVLKPVESSDMKMTQLFTKVESEDTSSLFDKLKKEPDALTLLAPAAGDTIISLDFGSND

SEQ ID NO: 458 - protein, 224 aa, Homo sapiens
SEDTSSLFDKLKKEPDALTLLAPAAGDTIISLDFGSNDTETDDQQLEEVPLYNDVMLPSPNEKLQNINLAMSPLPTAETPKPLRSSADPALNQEVALKLEPNPESLELSFTMPQIQDQTPSPSDGSTRQSSPEPNSPSEYCFYVDSDMVNEFKLELVEKLFAEDTEAKNPFSTQDTDLDLEMLAPYIPMDDDFQLRSFDQLSPLESSSASPESASPQSTVTVFQ

SEQ ID NO: 459 - DNA, 750 bp, Homo sapiens
gacatcgtgatgacccagtcccctctgtctttacccgttacacccggtgaacccgccagcattagctgtaggtccaccaagtctttactgcacagcaacggcaacacctatttatactggttcttacagaagcccggccaatccccccagctgctgatctatcgtatgagcaatttagctagcggcgtgcccgacagattcagcggcagcggctccggaaccgacttcactttaaagatctccagagtggaggccgaggacgtgggcgtttactactgcatgcagcatttagagtaccccttcaccttcggcggcggcaccaaggtggagatcaagggtggcggcggcagcggcggcggtggcagcggaggcggaggcagcgagatccagctgcagcaaagcggcgccgaggtgaaaaagcccggcagcagcgtcaaggtgagctgcaaggccagcggctacaccttcaccgattacgacatgcactgggtgagacaagctcccggtcaaggtttagagtggatcggcacaatcgaccccgagaccggcggcacagcctacaaccagaagtttaagggtcgtgccactttaacagccgatcgttccaccagcaccgcctacatggagctgagctctttaaggtccgaggacaccgctgtgtactattgcaccagcttctattacacctacagcaactacgacgtgggctttgcctactggggccaaggtaccctcgtgacagtcagcagc

SEQ ID NO: 460 - DNA, 750 bp, Homo sapiens
gacatcgtgatgacccagagccccctctctttacccgttacacccggtgagcccgctagcatcagctgtcgtagcaccaagtccttattacactccaacggcaacacctatttatactggttcctccagaaacccggccagtccccccagctgctgatctatcgtatgagcaatttagcctccggcgtgcccgatagatttagcggcagcggtagcggcaccgactttactttaaagatctctcgtgtggaggccgaggacgtgggtgtgtactactgcatgcagcatttagagtaccccttcacctttggcggcggcaccaaggtggagatcaaaggcggcggaggaagcggcggcggcggctccggcggcggaggctccgagattcagctccagcagagcggcgccgaggtgaaaaaacccggctcctccgtgaaggtgtcttgtaaggccagcggctacaccttcacagactacgacatgcactgggtgaggcaagctcccggtcaaggactggagtggatgggcaccatcgaccccgaaactggtggcacagcctacaaccagaagttcaagggtcgtgtgaccatcaccgccgataagagcacctccaccgcctacatggagctgagctctttaaggagcgaggacaccgccgtgtattactgcaccagcttctactacacctacagcaactacgacgtgggcttcgcctactggggccaaggtactttagtgaccgtgtccagc

SEQ ID NO: 461 - DNA, 750 bp, Homo sapiens
gacatcgtgatgacccagagccctctgtctttacccgtgacacccggtgagcccgctagcattagctgtcgttccaccaagtctttactgcactccaacggcaacacctatttatactggtatttacagaagcccggccagagcccccagctgctgatctataggatgagcaatttagccagcggcgtgcccgatagattcagcggcagcggaagcggcaccgacttcactttaaagatcagcagagtggaagccgaggacgtgggtgtgtactactgcatgcagcatttagagtaccccttcaccttcggcggcggaaccaaggtggagatcaagggcggcggcggcagcggcggaggaggaagcggaggcggcggctccgagattcagctgcagcaaagcggcgccgaggtgaaaaagcccggtagcagcgtgaaggtgagctgtaaggccagcggctacaccttcaccgactacgatatgcactgggtgaagcaagcccccggtcacggactggagtggatcggcaccattgaccccgagactggtggcaccgcctacaaccagaaattcaagggcaaggccacactgaccgccgatcgttccaccagcacagcctatatggagctgagctctttaaccagcgaggacaccgccgtgtattactgcacctccttttactacacctacagcaactacgacgtgggcttcgcctactggggccaaggtactttagtgaccgtgagctcc

SEQ ID NO: 462 - DNA, 750 bp, Homo sapiens
gacattgtcatgacacagagccctctgtctttacccgttacacccggcgaacccgctagcatcagctgtcgttccaccaaatctttactgcactccaacggcaacacctatttatactggttcttacagaagcccggccaaagcccccagctgctgatttatcgtatgagcaatttagccagcggcgtgcccgatcgtttttccggcagcggcagcggcacagacttcactttaaagatcagcagagtggaggccgaggacgtgggcgtgtactactgcatgcagcacctcgagtacccctttaccttcggcggcggcaccaaagtggagatcaagggaggaggaggatccggcggaggaggaagcggaggcggcggctccgagattcagctgcagcagagcggcgctgaggtgaaaaagcccggcagcagcgtgaaggtgtcttgtaaagcctccggctacaccttcaccgactacgatatgcactgggtgaagcaagctcccggtcaaggtctggagtggatcggcaccatcgatcccgaaaccggcggtaccgcctacaaccagaagttcaaaggcaaggccactttaaccgccgacagaagcacaagcaccgcttacatggagctgtcctctttaagatccgaggacaccgccgtgtattactgcacaagcttctactacacctactccaactacgacgtcggcttcgcctactggggccaaggcactttagtgacagtgagcagc

SEQ ID NO: 463 - DNA, 750 bp, Homo sapiens
gacatcgtgatgacccagagccctctgtctttacccgtgacacccggtgagcccgctagcattagctgtcgttccaccaagtctttactgcactccaacggcaacacctatttatactggttcttacagaagcccggccagagcccccagctgctgatctataggatgagcaatttagccagcggcgtgcccgatagattcagcggcagcggaagcggcaccgacttcactttaaagatcagcagagtggaagccgaggacgtgggtgtgtactactgcatgcagcatttagagtaccccttcaccttcggcggcggaaccaaggtggagatcaagggcggcggcggcagcggcggaggaggaagcggaggcggcggctccgagattcagctgcagcaaagcggcgccgaggtgaaaaagcccggtagcagcgtgaaggtgagctgtaaggccagcggctacaccttcaccgactacgatatgcactgggtgaagcaagcccccggtcacggactggagtggatcggcaccattgaccccgagactggtggcaccgcctacaaccagaaattcaagggcaaggccacactgaccgccgatcgttccaccagcacagcctatatggagctgagctctttaaccagcgaggacaccgccgtgtattactgcacctccttttactacacctacagcaactacgacgtgggcttcgcctactggggccaaggtactttagtgaccgtgagctcc

SEQ ID NO: 464 - DNA, 714 bp, Homo sapiens
agcagcgagctgacccaagatcccgctgtgtccgtggctttaggccagaccgtgaggatcacttgtcgtggcgactctttaaggaagtactacgccagctggtaccagcagaagcccagacaagctcctcagctggtgatctaccacaagaacaacagagccagcggcatccccgatcgtttctccggctccatcagcggcaacaccgcctctttaaccatcaccggagctcaagctgaggacgaagccgcctacttctgcaactctcgtgacaccagcggcaactatttagtgttcggcggaggcaccaaggtgaccgtgctgggaggcggaggaggcagcggcggcggcggctccggaggaggcggctcccagctgcaactgcaagaaagcggacccggtttagtgaaaccctccgagactttatctttaacttgtgctgtgtccggagccagcatcagcaactggtggtcttgggtgagacagccccccggcaaaggactggagtggatcggcgaggtgcaccacagcggcgtgaccacctacaagccctctttaaagtctcgtgtgaccatcagcgtggacaacagcaagaaccagctgtctttaaagctgacaagcgtgaccgccgctgacaccgccgtgtactactgcgccagagagttcgccgatgacgccttcgacatctggggaaggggcaccatggtgaccgtg

SEQ ID NO: 465 - DNA, 750 bp, Homo sapiens
gacatcgtgatgacccagagccccctctctttacccgttacacccggtgagcccgctagcatcagctgtcgtagcaccaagtccttattacactccaacggcaacacctatttatactggtacctccagaaacccggccagtccccccagctgctgatctatcgtatgagcaatttagcctccggcgtgcccgatagatttagcggcagcggtagcggcaccgactttactttaaagatctctcgtgtggaggccgaggacgtgggtgtgtactactgcatgcagcatttagagtaccccttcacctttggcggcggcaccaaggtggagatcaaaggcggcggaggaagcggcggcggcggctccggcggcggaggctccgagattcagctccagcagagcggcgccgaggtgaaaaaacccggctcctccgtgaaggtgtcttgtaaggccagcggctacaccttcacagactacgacatgcactgggtgaggcaagctcccggtcaaggactggagtggatgggcaccatcgaccccgaaactggtggcacagcctacaaccagaagttcaagggtcgtgtgaccatcaccgccgataagagcacctccaccgcctacatggagctgagctctttaaggagcgaggacaccgccgtgtattactgcaccagcttctactacacctacagcaactacgacgtgggcttcgcctactggggccaaggtactttagtgaccgtgtccagc

SEQ ID NO: 466 - DNA, 750 bp, Homo sapiens
gacatcgtgatgacccagtcccctctgtctttacccgttacacccggtgaacccgccagcattagctgtaggtccaccaagtctttactgcacagcaacggcaacacctatttatactggtatttacagaagcccggccaatccccccagctgctgatctatcgtatgagcaatttagctagcggcgtgcccgacagattcagcggcagcggctccggaaccgacttcactttaaagatctccagagtggaggccgaggacgtgggcgtttactactgcatgcagcatttagagtaccccttcaccttcggcggcggcaccaaggtggagatcaagggtggcggcggcagcggcggcggtggcagcggaggcggaggcagcgagatccagctgcagcaaagcggcgccgaggtgaaaaagcccggcagcagcgtcaaggtgagctgcaaggccagcggctacaccttcaccgattacgacatgcactgggtgagacaagctcccggtcaaggtttagagtggatcggcacaatcgaccccgagaccggcggcacagcctacaaccagaagtttaagggtcgtgccactttaacagccgatcgttccaccagcaccgcctacatggagctgagctctttaaggtccgaggacaccgctgtgtactattgcaccagcttctattacacctacagcaactacgacgtgggctttgcctactggggccaaggtaccctcgtgacagtcagcagc

SEQ ID NO: 467 - protein, 10 aa, Artificial Sequence
  Synthesized
GGGGSGGGGS

SEQ ID NO: 468 - protein, 10 aa, Artificial Sequence
  Synthesized
EAAAREAAAR

SEQ ID NO: 469 - DNA, 390 bp, Artificial Sequence
  Synthesized
tcgaggtcgacggtatcgataagcttgatatcgaattaggaggaaaaactgtttcatacagaaggcgtcaattaggaggaaaaactgtttcatacagaaggcgtcaattaggaggaaaaactgtttcatacagaaggcgtcaattggtcccatcgaattaggaggaaaaactgtttcatacagaaggcgtcaattaggaggaaaaactgtttcatacagaaggcgtcaattaggaggaaaaactgtttcatacagaaggcgtcaattggtcccgggacattttgacacccccataatatttttccagaattaacagtataaattgcatctcttgttcaagagttccctatcactctctttaatcactactcacagtaacctcaactcctg

SEQ ID NO: 470 - protein, 720 aa, Artificial Sequence
  Synthesized
MCHQQLVISWFSLVFLASPLVAIWELKKDVYVVELDWYPDAPGEMVVLTCDTPEEDGITWTLDQSSEVLGSGKTLTIQVKEFGDAGQYTCHKGGEVLSHSLLLLHKKEDGIWSTDILKDQKEPKNKTFLRCEAKNYSGRFTCWWLTTISTDLTFSVKSSRGSSDPQGVTCGAATLSAERVRGDNKEYEYSVECQEDSACPAAEESLPIEVMVDAVHKLKYENYTSSFFIRDIIKPDPPKNLQLKPLKNSRQVEVSWEYPDTWSTPHSYFSLTFCVQVQGKSKREKKDRVFTDKTSATVICRKNASISVRAQDRYYSSSWSEWASVPCSGGGGGGSRNLPVATPDPGMFPCLHHSQNLLRAVSNMLQKARQTLEFYPCTSEEIDHEDITKDKTSTVEACLPLELTKNESCLNSRETSFITNGSCLASRKTSFMMALCLSSIYEDLKMYQVEFKTMNAKLLMDPKRQIFLDQNMLAVIDELMQALNFNSETVPQKSSLEEPDFYKTKIKLCILLHAFRIRAVTIDRVMSYLNASGSGATNFSLLKQAGDVEENPGPMKYTSYILAFQLCIVLGSLGCYCQDPYVKEAENLKKYFNAGHSDVADNGTLFLGILKNWKEESDRKIMQSQIVSFYFKLFKNFKDDQSIQKSVETIKEDMNVKFFNSNKKKRDDFEKLTNYSVTDLNVQRKAIHELIQVMAELSPAAKTGKRKRSQMLFRGRRASQ

SEQ ID NO: 471 - protein, 720 aa, Artificial Sequence
  Synthesized
MKYTSYILAFQLCIVLGSLGCYCQDPYVKEAENLKKYFNAGHSDVADNGTLFLGILKNWKEESDRKIMQSQIVSFYFKLFKNFKDDQSIQKSVETIKEDMNVKFFNSNKKKRDDFEKLTNYSVTDLNVQRKAIHELIQVMAELSPAAKTGKRKRSQMLFRGRRASQGSGATNFSLLKQAGDVEENPGPMCHQQLVISWFSLVFLASPLVAIWELKKDVYVVELDWYPDAPGEMVVLTCDTPEEDGITWTLDQSSEVLGSGKTLTIQVKEFGDAGQYTCHKGGEVLSHSLLLLHKKEDGIWSTDILKDQKEPKNKTFLRCEAKNYSGRFTCWWLTTISTDLTFSVKSSRGSSDPQGVTCGAATLSAERVRGDNKEYEYSVECQEDSACPAAEESLPIEVMVDAVHKLKYENYTSSFFIRDIIKPDPPKNLQLKPLKNSRQVEVSWEYPDTWSTPHSYFSLTFCVQVQGKSKREKKDRVFTDKTSATVICRKNASISVRAQDRYYSSSWSEWASVPCSGGGGGGSRNLPVATPDPGMFPCLHHSQNLLRAVSNMLQKARQTLEFYPCTSEEIDHEDITKDKTSTVEACLPLELTKNESCLNSRETSFITNGSCLASRKTSFMMALCLSSIYEDLKMYQVEFKTMNAKLLMDPKRQIFLDQNMLAVIDELMQALNFNSETVPQKSSLEEPDFYKTKIKLCILLHAFRIRAVTIDRVMSYLNAS

SEQ ID NO: 472 - protein, 616 aa, Artificial Sequence
  Synthesized
MCHQQLVISWFSLVFLASPLVAIWELKKDVYVVELDWYPDAPGEMVVLTCDTPEEDGITWTLDQSSEVLGSGKTLTIQVKEFGDAGQYTCHKGGEVLSHSLLLLHKKEDGIWSTDILKDQKEPKNKTFLRCEAKNYSGRFTCWWLTTISTDLTFSVKSSRGSSDPQGVTCGAATLSAERVRGDNKEYEYSVECQEDSACPAAEESLPIEVMVDAVHKLKYENYTSSFFIRDIIKPDPPKNLQLKPLKNSRQVEVSWEYPDTWSTPHSYFSLTFCVQVQGKSKREKKDRVFTDKTSATVICRKNASISVRAQDRYYSSSWSEWASVPCSGGGGGGSRNLPVATPDPGMFPCLHHSQNLLRAVSNMLQKARQTLEFYPCTSEEIDHEDITKDKTSTVEACLPLELTKNESCLNSRETSFITNGSCLASRKTSFMMALCLSSIYEDLKMYQVEFKTMNAKLLMDPKRQIFLDQNMLAVIDELMQALNFNSETVPQKSSLEEPDFYKTKIKLCILLHAFRIRAVTIDRVMSYLNASEAAAREAAARGIIQHDLIFSLQQTECVLKPVESSDMKMTQLFTKVESEDTSSLFDKLKKEPDALTLLAPAAGDTIISLDFGSND

SEQ ID NO: 473 - protein, 616 aa, Artificial Sequence
  Synthesized
GIIQHDLIFSLQQTECVLKPVESSDMKMTQLFTKVESEDTSSLFDKLKKEPDALTLLAPAAGDTIISLDFGSNDEAAAREAAARMCHQQLVISWFSLVFLASPLVAIWELKKDVYVVELDWYPDAPGEMVVLTCDTPEEDGITWTLDQSSEVLGSGKTLTIQVKEFGDAGQYTCHKGGEVLSHSLLLLHKKEDGIWSTDILKDQKEPKNKTFLRCEAKNYSGRFTCWWLTTISTDLTFSVKSSRGSSDPQGVTCGAATLSAERVRGDNKEYEYSVECQEDSACPAAEESLPIEVMVDAVHKLKYENYTSSFFIRDIIKPDPPKNLQLKPLKNSRQVEVSWEYPDTWSTPHSYFSLTFCVQVQGKSKREKKDRVFTDKTSATVICRKNASISVRAQDRYYSSSWSEWASVPCSGGGGGGSRNLPVATPDPGMFPCLHHSQNLLRAVSNMLQKARQTLEFYPCTSEEIDHEDITKDKTSTVEACLPLELTKNESCLNSRETSFITNGSCLASRKTSFMMALCLSSIYEDLKMYQVEFKTMNAKLLMDPKRQIFLDQNMLAVIDELMQALNFNSETVPQKSSLEEPDFYKTKIKLCILLHAFRIRAVTIDRVMSYLNAS

SEQ ID NO: 474 - protein, 250 aa, Artificial Sequence
  Synthesized
MKYTSYILAFQLCIVLGSLGCYCQDPYVKEAENLKKYFNAGHSDVADNGTLFLGILKNWKEESDRKIMQSQIVSFYFKLFKNFKDDQSIQKSVETIKEDMNVKFFNSNKKKRDDFEKLTNYSVTDLNVQRKAIHELIQVMAELSPAAKTGKRKRSQMLFRGRRASQEAAAREAAARGIIQHDLIFSLQQTECVLKPVESSDMKMTQLFTKVESEDTSSLFDKLKKEPDALTLLAPAAGDTIISLDFGSND

SEQ ID NO: 475 - protein, 250 aa, Artificial Sequence
  Synthesized
GIIQHDLIFSLQQTECVLKPVESSDMKMTQLFTKVESEDTSSLFDKLKKEPDALTLLAPAAGDTIISLDFGSNDEAAAREAAARMKYTSYILAFQLCIVLGSLGCYCQDPYVKEAENLKKYFNAGHSDVADNGTLFLGILKNWKEESDRKIMQSQIVSFYFKLFKNFKDDQSIQKSVETIKEDMNVKFFNSNKKKRDDFEKLTNYSVTDLNVQRKAIHELIQVMAELSPAAKTGKRKRSQMLFRGRRASQ

SEQ ID NO: 476 - protein, 296 aa, Artificial Sequence
  Synthesized
MNSFSTSAFGPVAFSLGLLLVLPAAFPAPVPPGEDSKDVAAPHRQPLTSSERIDKQIRYILDGISALRKETCNKSNMCESSKEALAENNLNLPKMAEKDGCFQSGFNEETCLVKIITGLLEFEVYLEYLQNRFESSEEQARAVQMSTKVLIQFLQKKAKNLDAITTPDPTTNASLLTKLQAQNQWLQDMTTHLILRSFKEFLQSSLRALRQMEAAAREAAARGIIQHDLIFSLQQTECVLKPVESSDMKMTQLFTKVESEDTSSLFDKLKKEPDALTLLAPAAGDTIISLDFGSND

SEQ ID NO: 477 - protein, 296 aa, Artificial Sequence
  Synthesized
GIIQHDLIFSLQQTECVLKPVESSDMKMTQLFTKVESEDTSSLFDKLKKEPDALTLLAPAAGDTIISLDFGSNDEAAAREAAARMNSFSTSAFGPVAFSLGLLLVLPAAFPAPVPPGEDSKDVAAPHRQPLTSSERIDKQIRYILDGISALRKETCNKSNMCESSKEALAENNLNLPKMAEKDGCFQSGFNEETCLVKIITGLLEFEVYLEYLQNRFESSEEQARAVQMSTKVLIQFLQKKAKNLDAITTPDPTTNASLLTKLQAQNQWLQDMTTHLILRSFKEFLQSSLRALRQM

SEQ ID NO: 478 - protein, 400 aa, Artificial Sequence
  Synthesized
MNSFSTSAFGPVAFSLGLLLVLPAAFPAPVPPGEDSKDVAAPHRQPLTSSERIDKQIRYILDGISALRKETCNKSNMCESSKEALAENNLNLPKMAEKDGCFQSGFNEETCLVKIITGLLEFEVYLEYLQNRFESSEEQARAVQMSTKVLIQFLQKKAKNLDAITTPDPTTNASLLTKLQAQNQWLQDMTTHLILRSFKEFLQSSLRALRQMGSGATNFSLLKQAGDVEENPGPMKYTSYILAFQLCIVLGSLGCYCQDPYVKEAENLKKYFNAGHSDVADNGTLFLGILKNWKEESDRKIMQSQIVSFYFKLFKNFKDDQSIQKSVETIKEDMNVKFFNSNKKKRDDFEKLTNYSVTDLNVQRKAIHELIQVMAELSPAAKTGKRKRSQMLFRGRRASQ

SEQ ID NO: 479 - protein, 400 aa, Artificial Sequence
  Synthesized
MKYTSYILAFQLCIVLGSLGCYCQDPYVKEAENLKKYFNAGHSDVADNGTLFLGILKNWKEESDRKIMQSQIVSFYFKLFKNFKDDQSIQKSVETIKEDMNVKFFNSNKKKRDDFEKLTNYSVTDLNVQRKAIHELIQVMAELSPAAKTGKRKRSQMLFRGRRASQGSGATNFSLLKQAGDVEENPGPMNSFSTSAFGPVAFSLGLLLVLPAAFPAPVPPGEDSKDVAAPHRQPLTSSERIDKQIRYILDGISALRKETCNKSNMCESSKEALAENNLNLPKMAEKDGCFQSGFNEETCLVKIITGLLEFEVYLEYLQNRFESSEEQARAVQMSTKVLIQFLQKKAKNLDAITTPDPTTNASLLTKLQAQNQWLQDMTTHLILRSFKEFLQSSLRALRQM

SEQ ID NO: 480 - protein, 720 aa, Artificial Sequence
  Synthesized
MCHQQLVISWFSLVFLASPLVAIWELKKDVYVVELDWYPDAPGEMVVLTCDTPEEDGITWTLDQSSEVLGSGKTLTIQVKEFGDAGQYTCHKGGEVLSHSLLLLHKKEDGIWSTDILKDQKEPKNKTFLRCEAKNYSGRFTCWWLTTISTDLTFSVKSSRGSSDPQGVTCGAATLSAERVRGDNKEYEYSVECQEDSACPAAEESLPIEVMVDAVHKLKYENYTSSFFIRDIIKPDPPKNLQLKPLKNSRQVEVSWEYPDTWSTPHSYFSLTFCVQVQGKSKREKKDRVFTDKTSATVICRKNASISVRAQDRYYSSSWSEWASVPCSGGGGGGSRNLPVATPDPGMFPCLHHSQNLLRAVSNMLQKARQTLEFYPCTSEEIDHEDITKDKTSTVEACLPLELTKNESCLNSRETSFITNGSCLASRKTSFMMALCLSSIYEDLKMYQVEFKTMNAKLLMDPKRQIFLDQNMLAVIDELMQALNFNSETVPQKSSLEEPDFYKTKIKLCILLHAFRIRAVTIDRVMSYLNASGSGATNFSLLKQAGDVEENPGPMKYTSYILAFQLCIVLGSLGCYCQDPYVKEAENLKKYFNAGHSDVADNGTLFLGILKNWKEESDRKIMQSQIVSFYFKLFKNFKDDQSIQKSVETIAYDMNVKFFRSNKKKRDDFEKLTNYSVTDLNVQRKAIHELIQVMAELSPAAKTGKRKRSQMLFRGRRASQ

SEQ ID NO: 481 - protein, 720 aa, Artificial Sequence
  Synthesized
MKYTSYILAFQLCIVLGSLGCYCQDPYVKEAENLKKYFNAGHSDVADNGTLFLGILKNWKEESDRKIMQSQIVSFYFKLFKNFKDDQSIQKSVETIAYDMNVKFFRSNKKKRDDFEKLTNYSVTDLNVQRKAIHELIQVMAELSPAAKTGKRKRSQMLFRGRRASQGSGATNFSLLKQAGDVEENPGPMCHQQLVISWFSLVFLASPLVAIWELKKDVYVVELDWYPDAPGEMVVLTCDTPEEDGITWTLDQSSEVLGSGKTLTIQVKEFGDAGQYTCHKGGEVLSHSLLLLHKKEDGIWSTDILKDQKEPKNKTFLRCEAKNYSGRFTCWWLTTISTDLTFSVKSSRGSSDPQGVTCGAATLSAERVRGDNKEYEYSVECQEDSACPAAEESLPIEVMVDAVHKLKYENYTSSFFIRDIIKPDPPKNLQLKPLKNSRQVEVSWEYPDTWSTPHSYFSLTFCVQVQGKSKREKKDRVFTDKTSATVICRKNASISVRAQDRYYSSSWSEWASVPCSGGGGGGSRNLPVATPDPGMFPCLHHSQNLLRAVSNMLQKARQTLEFYPCTSEEIDHEDITKDKTSTVEACLPLELTKNESCLNSRETSFITNGSCLASRKTSFMMALCLSSIYEDLKMYQVEFKTMNAKLLMDPKRQIFLDQNMLAVIDELMQALNFNSETVPQKSSLEEPDFYKTKIKLCILLHAFRIRAVTIDRVMSYLNAS

SEQ ID NO: 482 - protein, 250 aa, Artificial Sequence
  Synthesized
MKYTSYILAFQLCIVLGSLGCYCQDPYVKEAENLKKYFNAGHSDVADNGTLFLGILKNWKEESDRKIMQSQIVSFYFKLFKNFKDDQSIQKSVETIAYDMNVKFFRSNKKKRDDFEKLTNYSVTDLNVQRKAIHELIQVMAELSPAAKTGKRKRSQMLFRGRRASQEAAAREAAARGIIQHDLIFSLQQTECVLKPVESSDMKMTQLFTKVESEDTSSLFDKLKKEPDALTLLAPAAGDTIISLDFGSND

SEQ ID NO: 483 - protein, 250 aa, Artificial Sequence
  Synthesized
GIIQHDLIFSLQQTECVLKPVESSDMKMTQLFTKVESEDTSSLFDKLKKEPDALTLLAPAAGDTIISLDFGSNDEAAAREAAARMKYTSYILAFQLCIVLGSLGCYCQDPYVKEAENLKKYFNAGHSDVADNGTLFLGILKNWKEESDRKIMQSQIVSFYFKLFKNFKDDQSIQKSVETIAYDMNVKFFRSNKKKRDDFEKLTNYSVTDLNVQRKAIHELIQVMAELSPAAKTGKRKRSQMLFRGRRASQ

SEQ ID NO: 484 - protein, 317 aa, Artificial Sequence
  Synthesized
MSTESMIRDVELAEEALPKKTGGPQGSRRCLFLSLFSFLIVAGATTLFCLLHFGVIGPQREEFPRDLSLISPLAQAVRSSSRTPSDKPVAHVVANPQAEGQLQWLNRRANALLANGVELRDNQLVVPSEGLYLIYSQVLFKGQGCPSTHVLLTHTISRIAVSYQTKVNLLSAIKSPCQRETPEGAEAKPWYEPIYLGGVFQLEKGDRLSAEINRPDYLDFAESGQVYFGIIALEAAAREAAARGIIQHDLIFSLQQTECVLKPVESSDMKMTQLFTKVESEDTSSLFDKLKKEPDALTLLAPAAGDTIISLDFGSND

SEQ ID NO: 485 - protein, 317 aa, Artificial Sequence
  Synthesized
GIIQHDLIFSLQQTECVLKPVESSDMKMTQLFTKVESEDTSSLFDKLKKEPDALTLLAPAAGDTIISLDFGSNDEAAAREAAARMSTESMIRDVELAEEALPKKTGGPQGSRRCLFLSLFSFLIVAGATTLFCLLHFGVIGPQREEFPRDLSLISPLAQAVRSSSRTPSDKPVAHVVANPQAEGQLQWLNRRANALLANGVELRDNQLVVPSEGLYLIYSQVLFKGQGCPSTHVLLTHTISRIAVSYQTKVNLLSAIKSPCQRETPEGAEAKPWYEPIYLGGVFQLEKGDRLSAEINRPDYLDFAESGQVYFGIIAL

SEQ ID NO: 486 - protein, 766 aa, Artificial Sequence
  Synthesized
MCHQQLVISWFSLVFLASPLVAIWELKKDVYVVELDWYPDAPGEMVVLTCDTPEEDGITWTLDQSSEVLGSGKTLTIQVKEFGDAGQYTCHKGGEVLSHSLLLLHKKEDGIWSTDILKDQKEPKNKTFLRCEAKNYSGRFTCWWLTTISTDLTFSVKSSRGSSDPQGVTCGAATLSAERVRGDNKEYEYSVECQEDSACPAAEESLPIEVMVDAVHKLKYENYTSSFFIRDIIKPDPPKNLQLKPLKNSRQVEVSWEYPDTWSTPHSYFSLTFCVQVQGKSKREKKDRVFTDKTSATVICRKNASISVRAQDRYYSSSWSEWASVPCSGGGGGGSRNLPVATPDPGMFPCLHHSQNLLRAVSNMLQKARQTLEFYPCTSEEIDHEDITKDKTSTVEACLPLELTKNESCLNSRETSFITNGSCLASRKTSFMMALCLSSIYEDLKMYQVEFKTMNAKLLMDPKRQIFLDQNMLAVIDELMQALNFNSETVPQKSSLEEPDFYKTKIKLCILLHAFRIRAVTIDRVMSYLNASGSGATNFSLLKQAGDVEENPGPMNSFSTSAFGPVAFSLGLLLVLPAAFPAPVPPGEDSKDVAAPHRQPLTSSERIDKQIRYILDGISALRKETCNKSNMCESSKEALAENNLNLPKMAEKDGCFQSGFNEETCLVKIITGLLEFEVYLEYLQNRFESSEEQARAVQMSTKVLIQFLQKKAKNLDAITTPDPTTNASLLTKLQAQNQWLQDMTTHLILRSFKEFLQSSLRALRQM

SEQ ID NO: 487 - protein, 766 aa, Artificial Sequence
  Synthesized
MNSFSTSAFGPVAFSLGLLLVLPAAFPAPVPPGEDSKDVAAPHRQPLTSSERIDKQIRYILDGISALRKETCNKSNMCESSKEALAENNLNLPKMAEKDGCFQSGFNEETCLVKIITGLLEFEVYLEYLQNRFESSEEQARAVQMSTKVLIQFLQKKAKNLDAITTPDPTTNASLLTKLQAQNQWLQDMTTHLILRSFKEFLQSSLRALRQMGSGATNFSLLKQAGDVEENPGPMCHQQLVISWFSLVFLASPLVAIWELKKDVYVVELDWYPDAPGEMVVLTCDTPEEDGITWTLDQSSEVLGSGKTLTIQVKEFGDAGQYTCHKGGEVLSHSLLLLHKKEDGIWSTDILKDQKEPKNKTFLRCEAKNYSGRFTCWWLTTISTDLTFSVKSSRGSSDPQGVTCGAATLSAERVRGDNKEYEYSVECQEDSACPAAEESLPIEVMVDAVHKLKYENYTSSFFIRDIIKPDPPKNLQLKPLKNSRQVEVSWEYPDTWSTPHSYFSLTFCVQVQGKSKREKKDRVFTDKTSATVICRKNASISVRAQDRYYSSSWSEWASVPCSGGGGGGSRNLPVATPDPGMFPCLHHSQNLLRAVSNMLQKARQTLEFYPCTSEEIDHEDITKDKTSTVEACLPLELTKNESCLNSRETSFITNGSCLASRKTSFMMALCLSSIYEDLKMYQVEFKTMNAKLLMDPKRQIFLDQNMLAVIDELMQALNFNSETVPQKSSLEEPDFYKTKIKLCILLHAFRIRAVTIDRVMSYLNAS

SEQ ID NO: 488 - protein, 400 aa, Artificial Sequence
  Synthesized
MNSFSTSAFGPVAFSLGLLLVLPAAFPAPVPPGEDSKDVAAPHRQPLTSSERIDKQIRYILDGISALRKETCNKSNMCESSKEALAENNLNLPKMAEKDGCFQSGFNEETCLVKIITGLLEFEVYLEYLQNRFESSEEQARAVQMSTKVLIQFLQKKAKNLDAITTPDPTTNASLLTKLQAQNQWLQDMTTHLILRSFKEFLQSSLRALRQMGSGATNFSLLKQAGDVEENPGPMKYTSYILAFQLCIVLGSLGCYCQDPYVKEAENLKKYFNAGHSDVADNGTLFLGILKNWKEESDRKIMQSQIVSFYFKLFKNFKDDQSIQKSVETIAYDMNVKFFRSNKKKRDDFEKLTNYSVTDLNVQRKAIHELIQVMAELSPAAKTGKRKRSQMLFRGRRASQ

SEQ ID NO: 489 - protein, 400 aa, Artificial Sequence
  Synthesized
MKYTSYILAFQLCIVLGSLGCYCQDPYVKEAENLKKYFNAGHSDVADNGTLFLGILKNWKEESDRKIMQSQIVSFYFKLFKNFKDDQSIQKSVETIAYDMNVKFFRSNKKKRDDFEKLTNYSVTDLNVQRKAIHELIQVMAELSPAAKTGKRKRSQMLFRGRRASQGSGATNFSLLKQAGDVEENPGPMNSFSTSAFGPVAFSLGLLLVLPAAFPAPVPPGEDSKDVAAPHRQPLTSSERIDKQIRYILDGISALRKETCNKSNMCESSKEALAENNLNLPKMAEKDGCFQSGFNEETCLVKIITGLLEFEVYLEYLQNRFESSEEQARAVQMSTKVLIQFLQKKAKNLDAITTPDPTTNASLLTKLQAQNQWLQDMTTHLILRSFKEFLQSSLRALRQM

SEQ ID NO: 490 - protein, 101 aa, Homo sapiens
MPKKKIQLHAEHALYDALMILNIVKTNSPPAEEKLEDYAFNFELILEEIARLFESGDQKDEAEKAKRMKEWMKRIKTTASEDEQEEMANAIITILQSWIFS

SEQ ID NO: 491 - protein, 185 aa, Artificial Sequence
  Synthesized
GIIQHDLIFSLQQTECVLKPVESSDMKMTQLFTKVESEDTSSLFDKLKKEPDALTLLAPAAGDTIISLDFGSNDEAAAREAAARMPKKKIQLHAEHALYDALMILNIVKTNSPPAEEKLEDYAFNFELILEEIARLFESGDQKDEAEKAKRMKEWMKRIKTTASEDEQEEMANAIITILQSWIFS

SEQ ID NO: 492 - protein, 185 aa, Artificial Sequence
  Synthesized
MPKKKIQLHAEHALYDALMILNIVKTNSPPAEEKLEDYAFNFELILEEIARLFESGDQKDEAEKAKRMKEWMKRIKTTASEDEQEEMANAIITILQSWIFSEAAAREAAARGIIQHDLIFSLQQTECVLKPVESSDMKMTQLFTKVESEDTSSLFDKLKKEPDALTLLAPAAGDTIISLDFGSND

SEQ ID NO: 493 - protein, 250 aa, Artificial Sequence; identical to SEQ ID NO: 474
  Synthesized

SEQ ID NO: 494 - protein, 250 aa, Artificial Sequence; identical to SEQ ID NO: 475
  Synthesized

SEQ ID NO: 495 - protein, 21 aa, Aphthovirus A
GSGEGRGSLLTCGDVEENPGP

SEQ ID NO: 496 - protein, 22 aa, Aphthovirus A
GSGATNFSLLKQAGDVEENPGP

SEQ ID NO: 497 - protein, 23 aa, Aphthovirus A
GSGQCTNYALLKLAGDVESNPGP

SEQ ID NO: 498 - protein, 25 aa, Aphthovirus A
GSGVKQTLNFDLLKLAGDVESNPGP

SEQ ID NO: 499 - DNA, 75 bp, Homo sapiens
agttctgagaaaagtagttctgagaaaagtagttctgagaaaagtagttctgagaaaagtagttctgagaaaagt

SEQ ID NO: 500 - DNA, 183 bp, Artificial Sequence
  Synthesized
agttctgagaaaagtagttctgagaaaagtagttctgagaaaagtagttctgagaaaagtagttctgagaaaagtctcgaggatatcaagatctggcctcggcggccaagcttagacactagagggtatataatggaagctcgacttccagcttggcaatccggtactgttggtaaagccacc

SEQ ID NO: 501 - DNA, 125 bp, Homo sapiens
agcttcatttcccgtaaatcgtcgaagcttcatttcccgtaaatcgtcgaagcttcatttcccgtaaatcgtcgaagcttcatttcccgtaaatcgtcgaagcttcatttcccgtaaatcgtcga

SEQ ID NO: 502 - DNA, 233 bp, Artificial Sequence
  synthesized
agcttcatttcccgtaaatcgtcgaagcttcatttcccgtaaatcgtcgaagcttcatttcccgtaaatcgtcgaagcttcatttcccgtaaatcgtcgaagcttcatttcccgtaaatcgtcgactcgaggatatcaagatctggcctcggcggccaagcttagacactagagggtatataatggaagctcgacttccagcttggcaatccggtactgttggtaaagccacc

SEQ ID NO: 503 - DNA, 75 bp, Homo sapiens
tagtttcactttccctagtttcactttccctagtttcactttccctagtttcactttccctagtttcactttccc

SEQ ID NO: 504 - DNA, 183 bp, Artificial Sequence
  Synthesized
tagtttcactttccctagtttcactttccctagtttcactttccctagtttcactttccctagtttcactttcccctcgaggatatcaagatctggcctcggcggccaagcttagacactagagggtatataatggaagctcgacttccagcttggcaatccggtactgttggtaaagccacc

SEQ ID NO: 505 - DNA, 87 bp, Homo sapiens
gcaccagacagtgacgtcagctgccagatcccatggccgtcatactgtgacgtctttcagacaccccattgacgtcaatgggagaac

SEQ ID NO: 506 - DNA, 48 bp, Homo sapiens
agtatgtctagactgaagtatgtctagactgaagtatgtctagactga

SEQ ID NO: 507 - DNA, 115 bp, Homo sapiens
aggatgtccatattaggacatctaggatgtccatattaggacatctaggatgtccatattaggacatctaggatgtccatattaggacatctaggatgtccatattaggacatct

SEQ ID NO: 508 - DNA, 115 bp, Homo sapiens
agtatgtccatattaggacatctaccatgtccatattaggacatctactatgtccatattaggacatcttgtatgtccatattaggacatctaaaatgtccatattaggacatct

SEQ ID NO: 509 - DNA, 87 bp, Homo sapiens; identical to SEQ ID NO: 505

SEQ ID NO: 510 - DNA, 120 bp, Homo sapiens
agatcaaagggtttaagatcaaagggcttaagatcaaagggtataagatcaaagggcctaagatcaaagggactaagatcaaagggtttaagatcaaagggcttaagatcaaagggccta

SEQ ID NO: 511 - protein, 188 aa, Homo sapiens [sequence omitted]

SEQ ID NO: 512 - protein, 189 aa, Homo sapiens
MALSFSLLMAVLVLSYKSICSLGCDLPQTHSLGNRRALILLAQMGRISHFSCLKDRHDFGFPEEEFDGHQFQKAQAISVLHEMIQQTFNLFSTEDSSAAWEQSLLEKFSTELYQQLNDLEACVIQEVGVEETPLMNEDSILAVRKYFQRITLYLTEKKYSPCAWEVVRAEIMRSLSFSTNLQKRLRRKD

SEQ ID NO: 513 - protein, 189 aa, Homo sapiens
MALPFVLLMALVVLNCKSICSLGCDLPQTHSLSNRRTLMIMAQMGRISPFSCLKDRHDFGFPQEEFDGNQFQKAQAISVLHEMIQQTFNLFSTKDSSATWDETLLDKFYTELYQQLNDLEACMMQEVGVEDTPLMNVDSILTVRKYFQRITLYLTEKKYSPCAWEVVRAEIMRSFSLSANLQERLRRKE

SEQ ID NO: 514 - protein, 189 aa, Homo sapiens
MALPFALLMALVVLSCKSSCSLDCDLPQTHSLGHRRTMMLLAQMRRISLFSCLKDRHDFRFPQEEFDGNQFQKAEAISVLHEVIQQTFNLFSTKDSSVAWDERLLDKLYTELYQQLNDLEACVMQEVWVGGTPLMNEDSILAVRKYFQRITLYLTEKKYSPCAWEVVRAEIMRSFSSSRNLQERLRRKE

SEQ ID NO: 515 - protein, 189 aa, Homo sapiens
MARSFSLLMVVLVLSYKSICSLGCDLPQTHSLRNRRALILLAQMGRISPFSCLKDRHEFRFPEEEFDGHQFQKTQAISVLHEMIQQTFNLFSTEDSSAAWEQSLLEKFSTELYQQLNDLEACVIQEVGVEETPLMNEDFILAVRKYFQRITLYLMEKKYSPCAWEVVRAEIMRSFSFSTNLKKGLRRKD

SEQ ID NO: 516 - protein, 189 aa, Homo sapiens
MALTFYLLVALVVLSYKSFSSLGCDLPQTHSLGNRRALILLAQMRRISPFSCLKDRHDFEFPQEEFDDKQFQKAQAISVLHEMIQQTFNLFSTKDSSAALDETLLDEFYIELDQQLNDLESCVMQEVGVIESPLMYEDSILAVRKYFQRITLYLTEKKYSSCAWEVVRAEIMRSFSLSINLQKRLKSKE

SEQ ID NO: 517 - protein, 189 aa, Homo sapiens
MALSFSLLMAVLVLSYKSICSLGCDLPQTHSLGNRRALILLGQMGRISPFSCLKDRHDFRIPQEEFDGNQFQKAQAISVLHEMIQQTFNLFSTEDSSAAWEQSLLEKFSTELYQQLNDLEACVIQEVGVEETPLMNEDSILAVRKYFQRITLYLIERKYSPCAWEVVRAEIMRSLSFSTNLQKRLRRKD

SEQ ID NO: 518 - protein, 189 aa, Homo sapiens
MALPFALMMALVVLSCKSSCSLGCNLSQTHSLNNRRTLMLMAQMRRISPFSCLKDRHDFEFPQEEFDGNQFQKAQAISVLHEMMQQTFNLFSTKNSSAAWDETLLEKFYIELFQQMNDLEACVIQEVGVEETPLMNEDSILAVKKYFQRITLYLMEKKYSPCAWEVVRAEIMRSLSFSTNLQKRLRRKD

SEQ ID NO: 519 - protein, 189 aa, Homo sapiens
MALSFSLLMAVLVLSYKSICSLGCDLPQTHSLGNRRALILLAQMGRISHFSCLKDRYDFGFPQEVFDGNQFQKAQAISAFHEMIQQTFNLFSTKDSSAAWDETLLDKFYIELFQQLNDLEACVTQEVGVEEIALMNEDSILAVRKYFQRITLYLMGKKYSPCAWEVVRAEIMRSFSFSTNLQKGLRRKD

SEQ ID NO: 520 - protein, 189 aa, Homo sapiens
MALSFSLLMAVLVLSYKSICSLGCDLPQTHSLGNRRALILLAQMGRISPFSCLKDRHDFGLPQEEFDGNQFQKTQAISVLHEMIQQTFNLFSTEDSSAAWEQSLLEKFSTELYQQLNNLEACVIQEVGMEETPLMNEDSILAVRKYFQRITLYLTEKKYSPCAWEVVRAEIMRSLSFSTNLQKILRRKD

SEQ ID NO: 521 - protein, 187 aa, Homo sapiens
MTNKCLLQIALLLCFSTTALSMSYNLLGFLQRSSNFQCQKLLWQLNGRLEYCLKDRMNFDIPEEIKQLQQFQKEDAALTIYEMLQNIFAIFRQDSSSTGWNETIVENLLANVYHQINHLKTVLEEKLEKEDFTRGKLMSSLHLKRYYGRILHYLKAKEYSHCAWTIVRVEILRNFYFINRLTGYLRN

SEQ ID NO: 522 - protein, 207 aa, Homo sapiens
MSTKPDMIQKCLWLEILMGIFIAGTLSLDCNLLNVHLRRVTWQNLRHLSSMSNSFPVECLRENIAFELPQEFLQYTQPMKRDIKKAFYEMSLQAFNIFSQHTFKYWKERHLKQIQIGLDQQAEYLNQCLEEDKNENEDMKEMKENEMKPSEARVPQLSSLELRRYFHRIDNFLKEKKYSDCAWEIVRVEIRRCLYYFYKFTALFRRK

SEQ ID NO: 523 - protein, 195 aa, Homo sapiens
MALLFPLLAALVMTSYSPVGSLGCDLPQNHGLLSRNTLVLLHQMRRISPFLCLKDRRDFRFPQEMVKGSQLQKAHVMSVLHEMLQQIFSLFHTERSSAAWNMTLLDQLHTGLHQQLQHLETCLLQVVGEGESAGAISSPALTLRRYFQGIRVYLKEKKYSDCAWEVVRMEIMKSLFLSTNMQERLRSKDRDLGSS

SEQ ID NO: 524 - protein, 189 aa, Homo sapiens
MASPFALLMVLVVLSCKSSCSLGCDLPETHSLDNRRTLMLLAQMSRISPSSCLMDRHDFGFPQEEFDGNQFQKAPAISVLHELIQQIFNLFTTKDSSAAWDEDLLDKFCTELYQQLNDLEACVMQEERVGETPLMNADSILAVKKYFRRITLYLTEKKYSPCAWEVVRAEIMRSLSLSTNLQERLRRKE

SEQ ID NO: 525 - protein, 189 aa, Homo sapiens
MALSFSLLMAVLVLSYKSICSLGCDLPQTHSLGNRRALILLAQMGRISPFSCLKDRHDFGFPQEEFDGNQFQKAQAISVLHEMIQQTFNLFSTKDSSATWEQSLLEKFSTELNQQLNDLEACVIQEVGVEETPLMNVDSILAVKKYFQRITLYLTEKKYSPCAWEVVRAEIMRSFSLSKIFQERLRRKE

SEQ ID NO: 526 - protein, 426 aa, Homo sapiens
MCDRNGGRRLRQWLIEQIDSSMYPGLIWENEEKSMFRIPWKHAGKQDYNQEVDASIFKAWAVFKGKFKEGDKAEPATWKTRLRCALNKSPDFEEVTDRSQLDISEPYKVYRIVPEEEQKCKLGVATAGCVNEVTEMECGRSEIDELIKEPSVDDYMGMIKRSPSPPEACRSQLLPDWWAQQPSTGVPLVTGYTTYDAHHSAFSQMVISFYYGGKLVGQATTTCPEGCRLSLSQPGLPGTKLYGPEGLELVRFPPADAIPSERQRQVTRKLFGHLERGVLLHSSRQGVFVKRLCQGRVFCSGNAVVCKGRPNKLERDEVVQVFDTSQFFRELQQFYNSQGRLPDGRVVLCFGEEFPDMAPLRSKLILVQIEQLYVRQLAEEAGKSCGAGSVMQAPEEPPPDQVFRMFPDICASHQRSFFRENQQITV

SEQ ID NO: 527 - protein, 451 aa, Homo sapiens
MNLEGGGRGGEFGMSAVSCGNGKLRQWLIDQIDSGKYPGLVWENEEKSIFRIPWKHAGKQDYNREEDAALFKAWALFKGKFREGIDKPDPPTWKTRLRCALNKSNDFEELVERSQLDISDPYKVYRIVPEGAKKGAKQLTLEDPQMSMSHPYTMTTPYPSLPAQQVHNYMMPPLDRSWRDYVPDQPHPEIPYQCPMTFGPRGHHWQGPACENGCQVTGTFYACAPPESQAPGVPTEPSIRSAEALAFSDCRLHICLYYREILVKELTTSSPEGCRISHGHTYDASNLDQVLFPYPEDNGQRKNIEKLLSHLERGVVLWMAPDGLYAKRLCQSRIYWDGPLALCNDRPNKLERDQTCKLFDTQQFLSELQAFAHHGRSLPRFQVTLCFGEEFPDPQRQRKLITAHVEPLLARQLYYFAQQNSGHFLRGYDLPEHISNPEDYHRSIRHSSIQE

SEQ ID NO: 528 - protein, 2471 aa, Homo sapiens
MPALRPALLWALLALWLCCAAPAHALQCRDGYEPCVNEGMCVTYHNGTGYCKCPEGFLGEYCQHRDPCEKNRCQNGGTCVAQAMLGKATCRCASGFTGEDCQYSTSHPCFVSRPCLNGGTCHMLSRDTYECTCQVGFTGKECQWTDACLSHPCANGSTCTTVANQFSCKCLTGFTGQKCETDVNECDIPGHCQHGGTCLNLPGSYQCQCPQGFTGQYCDSLYVPCAPSPCVNGGTCRQTGDFTFECNCLPGFEGSTCERNIDDCPNHRCQNGGVCVDGVNTYNCRCPPQWTGQFCTEDVDECLLQPNACQNGGTCANRNGGYGCVCVNGWSGDDCSENIDDCAFASCTPGSTCIDRVASFSCMCPEGKAGLLCHLDDACISNPCHKGALCDTNPLNGQYICTCPQGYKGADCTEDVDECAMANSNPCEHAGKCVNTDGAFHCECLKGYAGPRCEMDINECHSDPCQNDATCLDKIGGFTCLCMPGFKGVHCELEINECQSNPCVNNGQCVDKVNRFQCLCPPGFTGPVCQIDIDDCSSTPCLNGAKCIDHPNGYECQCATGFTGVLCEENIDNCDPDPCHHGQCQDGIDSYTCICNPGYMGAICSDQIDECYSSPCLNDGRCIDLVNGYQCNCQPGTSGVNCEINFDDCASNPCIHGICMDGINRYSCVCSPGFTGQRCNIDIDECASNPCRKGATCINGVNGFRCICPEGPHHPSCYSQVNECLSNPCIHGNCTGGLSGYKCLCDAGWVGINCEVDKNECLSNPCQNGGTCDNLVNGYRCTCKKGFKGYNCQVNIDECASNPCLNQGTCFDDISGYTCHCVLPYTGKNCQTVLAPCSPNPCENAAVCKESPNFESYTCLCAPGWQGQRCTIDIDECISKPCMNHGLCHNTQGSYMCECPPGFSGMDCEEDIDDCLANPCQNGGSCMDGVNTFSCLCLPGFTGDKCQTDMNECLSEPCKNGGTCSDYVNSYTCKCQAGFDGVHCENNINECTESSCFNGGTCVDGINSFSCLCPVGFTGSFCLHEINECSSHPCLNEGTCVDGLGTYRCSCPLGYTGKNCQTLVNLCSRSPCKNKGTCVQKKAESQCLCPSGWAGAYCDVPNVSCDIAASRRGVLVEHLCQHSGVCINAGNTHYCQCPLGYTGSYCEEQLDECASNPCQHGATCSDFIGGYRCECVPGYQGVNCEYEVDECQNQPCQNGGTCIDLVNHFKCSCPPGTRGLLCEENIDDCARGPHCLNGGQCMDRIGGYSCRCLPGFAGERCEGDINECLSNPCSSEGSLDCIQLTNDYLCVCRSAFTGRHCETFVDVCPQMPCLNGGTCAVASNMPDGFICRCPPGFSGARCQSSCGQVKCRKGEQCVHTASGPRCFCPSPRDCESGCASSPCQHGGSCHPQRQPPYYSCQCAPPFSGSRCELYTAPPSTPPATCLSQYCADKARDGVCDEACNSHACQWDGGDCSLTMENPWANCSSPLPCWDYINNQCDELCNTVECLFDNFECQGNSKTCKYDKYCADHFKDNHCDQGCNSEECGWDGLDCAADQPENLAEGTLVIVVLMPPEQLLQDARSFLRALGTLLHTNLRIKRDSQGELMVYPYYGEKSAAMKKQRMTRRSLPGEQEQEVAGSKVFLEIDNRQCVQDSDHCFKNTDAAAALLASHAIQGTLSYPLVSVVSESLTPERTQLLYLLAVAVVIILFIILLGVIMAKRKRKHGSLWLPEGFTLRRDASNHKRREPVGQDAVGLKNLSVQVSEANLIGTGTSEHWVDDEGPQPKKVKAEDEALLSEEDDPIDRRPWTQQHLEAADIRRTPSLALTPPQAEQEVDVLDVNVRGPDGCTPLMLASLRGGSSDLSDEDEDAEDSSANIITDLVYQGASLQAQTDRTGEMALHLAARYSRADAAKRLLDAGADANAQDNMGRCPLHAAVAADAQGVFQILIRNRVTDLDARMNDGTTPLILAARLAVEGMVAELINCQADVNAVDDHGKSALHWAAAVNNVEATLLLLKNGANRDMQDNKEETPLFLAAREGSYEAAKILLDHFANRDITDHMDRLPRDVARDRMHHDIVRLLDEYNVTPSPPGTVLTSALSPVICGPNRSFLSLKHTPMGKKSRRPSAKSTMPTSLPNLAKEAKDAKGSRRKKSLSEKVQLSESSVTLSPVDSLESPHTYVSDTTSSPMITSPGILQASPNPMLATAAPPAPVHAQHALSFSNLHEMQPLAHGASTVLPSVSQLLSHHHIVSPGSGSAGSLSRLHPVPVPADWMNRMEVNETQYNEMFGMVLAPAEGTHPGIAPQSRPPEGKHITTPREPLPPIVTFQLIPKGSIAQPAGAPQPQSTCPPAVAGPLPTMYQIPEMARLPSVAFPTAMMPQQDGQVAQTILPAYHPFPASVGKYPTPPSQHSYASSNAAERTPSHSGHLQGEHPYLTPSPESPDQWSSSSPHSASDWSDVTTSPTPGGAGGGQRGPGTHMSEPPHNNMQVYA

SEQ ID NO: 529 - protein, 513 aa, Homo sapiens
MRQPPGESDMAVSDALLPSFSTFASGPAGREKTLRQAGAPNNRWREELSHMKRLPPVLPGRPYDLAAATVATDLESGGAGAACGGSNLAPLPRRETEEFNDLLDLDFILSNSLTHPPESVAATVSSSASASSSSSPSSSGPASAPSTCSFTYPIRAGNDPGVAPGGTGGGLLYGRESAPPPTAPFNLADINDVSPSGGFVAELLRPELDPVYIPPQQPQPPGGGLMGKFVLKASLSAPGSEYGSPSVISVSKGSPDGSHPVVVAPYNGGPPRTCPKIKQEAVSSCTHLGAGPPLSNGHRPAAHDFPLGRQLPSRTTPTLGLEEVLSSRDCHPALPLPPGFHPHPGPNYPSFLPDQMQPQVPPLHYQGQSRGFVARAGEPCVCWPHFGTHGMMLTPPSSPLELMPPGSCMPEEPKPKRGRRSWPRKRTATHTCDYAGCGKTYTKSSHLKAHLRTHTGEKPYHCDWDGCGWKFARSDELTRHYRKHTGHRPFQCQKCDRAFSRSDHLALHMKRHF

SEQ ID NO: 530 - protein, 127 aa, Homo sapiens
MSQGLPAAGSVLQRSVAAPGNQPQPQPQQQSPEDDDRKVRRREKNRVAAQRSRKKQTQKADKLHEEYESLEQENTMLRREIGKLTEELKHLTEALKEHEKMCPLLLCPMNFVPVPPRPDPVAGCLPR

SEQ ID NO: 531 - protein, 667 aa, Homo sapiens
MHHQQRMAALGTDKELSDLLDFSAMFSPPVSSGKNGPTSLASGHFTGSNVEDRSSSGSWGNGGHPSPSRNYGDGTPYDHMTSRDLGSHDNLSPPFVNSRIQSKTERGSYSSYGRESNLQGCHQQSLLGGDMDMGNPGTLSPTKPGSQYYQYSSNNPRRRPLHSSAMEVQTKKVRKVPPGLPSSVYAPSASTADYNRDSPGYPSSKPATSTFPSSFFMQDGHHSSDPWSSSSGMNQPGYAGMLGNSSHIPQSSSYCSLHPHERLSYPSHSSADINSSLPPMSTFHRSGTNHYSTSSCTPPANGTDSIMANRGSGAAGSSQTGDALGKALASIYSPDHTNNSFSSNPSTPVGSPPSLSAGTAVWSRNGGQASSSPNYEGPLHSLQSRIEDRLERLDDAIHVLRNHAVGPSTAMPGGHGDMHGIIGPSHNGAMGGLGSGYGTGLLSANRHSLMVGTHREDGVALRGSHSLLPNQVPVPQLPVQSATSPDLNPPQDPYRGMPPGLQGQSVSSGSSEIKSDDEGDENLQDTKSSEDKKLDDDKKDIKSITSNNDDEDLTPEQKAEREKERRMANNARERLRVRDINEAFKELGRMVQLHLKSDKPQTKLLILHQAVAVILSLEQQVRERNLNPKAACLKRREEEKVSSEPPPLSLAGPHPGMGDASNHMGQM

SEQ ID NO: 532 - DNA, 9792 bp, Artificial Sequence
  sythesized
cggctccggtgcccgtcagtgggcagagcgcacatcgcccacagtccccgagaagttggggggaggggtcggcaattgaaccggtgcctagagaaggtggcgcggggtaaactgggaaagtgatgtcgtgtactggctccgcctttttcccgagggtgggggagaaccgtatataagtgcagtagtcgccgtgaacgttctttttcgcaacgggtttgccgccagaacacaggatccgccaccatggccttaccagtgaccgccttgctcctgccgctggccttgctgctccacgccgccaggccggatatccagatgacccagagcccgagcagcctgagcgcgagcgtgggtgatcgcgtgaccattacctgcagggcaagtcaggacattagtaaatatttaaattggtatcagcagaaaccgggtaaagcgccgaaactgttaatttatcatacatcaagattacactcaggcgtgccgtcgcgttttagcggctcgggttcgggcaccgattttaccctgaccatctcgagcttgcagccggaggacttcgccacctactattgccaacagggtaatacgcttccgtacacgttcggtcagggcaccaaagtggagatcaaaggtggcggtggctcgggcggtggtgggtcgggtggcggcggatctgaggtgcagctggtggagtctgggggaggcttggtacagcctggggggtccctgagactctcctgtgcagcctctggagtgtccctgcctgattatggcgtgtcctgggtccgccaggctccagggaaggggctggagtgggtttcagtgatctggggcagcgagacaacctactacaacagcgccctgaagtcccgattcaccatctccagagacaatgccaagaactcactgtatctgcaaatgaacagcctgagagccgaggacacggctgtgtattactgtgcgaagcactactactacggcggcagctacgctatggactactggggccaaggaaccctggtcaccgtgtcctcaaccacgacgccagcgccgcgaccaccaacaccggcgcccaccatcgcgtcgcagcccctgtccctgcgcccagaggcgtgccggccagcggcggggggcgcagtgcacacgagggggctggacttcgcctgtgatatctacatctgggcgcccttggccgggacttgtggggtccttctcctgtcactggttatcaccctttactgcaaacggggcagaaagaaactcctgtatatattcaaacaaccatttatgagaccagtacaaactactcaagaggaagatggctgtagctgccgatttccagaagaagaagaaggaggatgtgaactgagagtgaagttcagcaggagcgcagacgcccccgcgtaccagcagggccagaaccagctctataacgagctcaatctaggacgaagagaggagtacgatgttttggacaagaggcgtggccgggaccctgagatggggggaaagccgagaaggaagaaccctcaggaaggcctgtacaatgaactgcagaaagataagatggcggaggcctacagtgagattgggatgaaaggcgagcgccggaggggcaaggggcacgatggcctttaccagggtctcagtacagccaccaaggacacctacgacgcccttcacatgcaggccctgccccctcgctaagtcgactctagaactagtaatcaacctctggattacaaaatttgtgaaagattgactggtattcttaactatgttgctccttttacgctatgtggatacgctgctttaatgcctttgtatcatgctattgcttcccgtatggctttcattttctcctccttgtataaatcctggttgctgtctctttatgaggagttgtggcccgttgtcaggcaacgtggcgtggtgtgcactgtgtttgctgacgcaacccccactggttggggcattgccaccacctgtcagctcctttccgggactttcgctttccccctccctattgccacggcggaactcatcgccgcctgccttgcccgctgctggacaggggctcggctgttgggcactgacaattccgtggtgttgtcggggaagctgacgtcctttccatggctgctcgcctgtgttgccacctggattctgcgcgggacgtccttctgctacgtcccttcggccctcaatccagcggaccttccttcccgcggcctgctgccggctctgcggcctcttccgcgtcttcgccttcgccctcagacgagtcggatctccctttgggccgcctccccgcctgccgcggaattcgagctcggtacctttaagaccaatgacttacaaggcagctgtagatcttagccactttttaaaagaaaaggggggactggaagggctaattcactcccaacgaagacaagatctgctttttgcttgtactgggtctctctggttagaccagatctgagcctgggagctctctggctaactagggaacccactgcttaagcctcaataaagcttgccttgagtgcttcaagtagtgtgtgcccgtctgttgtgtgactctggtaactagagatccctcagacccttttagtcagtgtggaaaatctctagcagtagtagttcatgtcatcttattattcagtatttataacttgcaaagaaatgaatatcagagagtgagaggaacttgtttattgcagcttataatggttacaaataaagcaatagcatcacaaatttcacaaataaagcatttttttcactgcattctagttgtggtttgtccaaactcatcaatgtatcttatcatgtctggctctagctatcccgcccctaactccgcccatcccgcccctaactccgcccagttccgcccattctccgccccatggctgactaattttttttatttatgcagaggccgaggccgcctcggcctctgagctattccagaagtagtgaggaggcttttttggaggcctagggacgtacccaattcgccctatagtgagtcgtattacgcgcgctcactggccgtcgttttacaacgtcgtgactgggaaaaccctggcgttacccaacttaatcgccttgcagcacatccccctttcgccagctggcgtaatagcgaagaggcccgcaccgatcgcccttcccaacagttgcgcagcctgaatggcgaatgggacgcgccctgtagcggcgcattaagcgcggcgggtgtggtggttacgcgcagcgtgaccgctacacttgccagcgccctagcgcccgctcctttcgctttcttcccttcctttctcgccacgttcgccggctttccccgtcaagctctaaatcgggggctccctttagggttccgatttagtgctttacggcacctcgaccccaaaaaacttgattagggtgatggttcacgtagtgggccatcgccctgatagacggtttttcgccctttgacgttggagtccacgttctttaatagtggactcttgttccaaactggaacaacactcaaccctatctcggtctattcttttgatttataagggattttgccgatttcggcctattggttaaaaaatgagctgatttaacaaaaatttaacgcgaattttaacaaaatattaacgcttacaatttaggtggcacttttcggggaaatgtgcgcggaacccctatttgtttatttttctaaatacattcaaatatgtatccgctcatgagacaataaccctgataaatgcttcaataatattgaaaaaggaagagtatgagccatattcaacgggaaacgtcttgctctaggccgcgattaaattccaacatggatgctgatttatatgggtataaatgggctcgcgataatgtcgggcaatcaggtgcgacaatctatcgattgtatgggaagcccgatgcgccagagttgtttctgaaacatggcaaaggtagcgttgccaatgatgttacagatgagatggtcagactaaactggctgacggaatttatgcctcttccgaccatcaagcattttatccgtactcctgatgatgcatggttactcaccactgcgatccccgggaaaacagcattccaggtattagaagaatatcctgattcaggtgaaaatattgttgatgcgctggcagtgttcctgcgccggttgcattcgattcctgtttgtaattgtccttttaacagcgatcgcgtatttcgtctggctcaggcgcaatcacgaatgaataacggtttggttgatgcgagtgattttgatgacgagcgtaatggctggcctgttgaacaagtctggaaagaaatgcataaacttttgccattctcaccggattcagtcgtcactcatggtgatttctcacttgataaccttatttttgacgaggggaaattaataggttgtattgatgttggacgagtcggaatcgcagaccgataccaggatcttgccatcctatggaactgcctcggtgagttttctccttcattacagaaacggctttttcaaaaatatggtattgataatcctgatatgaataaattgcagtttcatttgatgctcgatgagtttttctaactgtcagaccaagtttactcatatatactttagattgatttaaaacttcatttttaatttaaaaggatctaggtgaagatcctttttgataatctcatgaccaaaatcccttaacgtgagttttcgttccactgagcgtcagaccccgtagaaaagatcaaaggatcttcttgagatcctttttttctgcgcgtaatctgctgcttgcaaacaaaaaaaccaccgctaccagcggtggtttgtttgccggatcaagagctaccaactctttttccgaaggtaactggcttcagcagagcgcagataccaaatactgttcttctagtgtagccgtagttaggccaccacttcaagaactctgtagcaccgcctacatacctcgctctgctaatcctgttaccagtggctgctgccagtggcgataagtcgtgtcttaccgggttggactcaagacgatagttaccggataaggcgcagcggtcgggctgaacggggggttcgtgcacacagcccagcttggagcgaacgacctacaccgaactgagatacctacagcgtgagctatgagaaagcgccacgcttcccgaagggagaaaggcggacaggtatccggtaagcggcagggtcggaacaggagagcgcacgagggagcttccagggggaaacgcctggtatctttatagtcctgtcgggtttcgccacctctgacttgagcgtcgatttttgtgatgctcgtcaggggggcggagcctatggaaaaacgccagcaacgcggcctttttacggttcctggccttttgctggccttttgctcacatgttctttcctgcgttatcccctgattctgtggataaccgtattaccgcctttgagtgagctgataccgctcgccgcagccgaacgaccgagcgcagcgagtcagtgagcgaggaagcggaagagcgcccaatacgcaaaccgcctctccccgcgcgttggccgattcattaatgcagctggcacgacaggtttcccgactggaaagcgggcagtgagcgcaacgcaattaatgtgagttagctcactcattaggcaccccaggctttacactttatgcttccggctcgtatgttgtgtggaattgtgagcggataacaatttcacacaggaaacagctatgaccatgattacgccaagcgcgcaattaaccctcactaaagggaacaaaagctggagctgcaagcttaatgtagtcttatgcaatactcttgtagtcttgcaacatggtaacgatgagttagcaacatgccttacaaggagagaaaaagcaccgtgcatgccgattggtggaagtaaggtggtacgatcgtgccttattaggaaggcaacagacgggtctgacatggattggacgaaccactgaattgccgcattgcagagatattgtatttaagtgcctagctcgatacataaacgggtctctctggttagaccagatctgagcctgggagctctctggctaactagggaacccactgcttaagcctcaataaagcttgccttgagtgcttcaagtagtgtgtgcccgtctgttgtgtgactctggtaactagagatccctcagacccttttagtcagtgtggaaaatctctagcagtggcgcccgaacagggacttgaaagcgaaagggaaaccagaggagctctctcgacgcaggactcggcttgctgaagcgcgcacggcaagaggcgaggggcggcgactggtgagtacgccaaaaattttgactagcggaggctagaaggagagagatgggtgcgagagcgtcagtattaagcgggggagaattagatcgcgatgggaaaaaattcggttaaggccagggggaaagaaaaaatataaattaaaacatatagtatgggcaagcagggagctagaacgattcgcagttaatcctggcctgttagaaacatcagaaggctgtagacaaatactgggacagctacaaccatcccttcagacaggatcagaagaacttagatcattatataatacagtagcaaccctctattgtgtgcatcaaaggatagagataaaagacaccaaggaagctttagacaagatagaggaagagcaaaacaaaagtaagaccaccgcacagcaagcggccgctgatcttcagacctggaggaggagatatgagggacaattggagaagtgaattatataaatataaagtagtaaaaattgaaccattaggagtagcacccaccaaggcaaagagaagagtggtgcagagagaaaaaagagcagtgggaataggagctttgttccttgggttcttgggagcagcaggaagcactatgggcgcagcgtcaatgacgctgacggtacaggccagacaattattgtctggtatagtgcagcagcagaacaatttgctgagggctattgaggcgcaacagcatctgttgcaactcacagtctggggcatcaagcagctccaggcaagaatcctggctgtggaaagatacctaaaggatcaacagctcctggggatttggggttgctctggaaaactcatttgcaccactgctgtgccttggaatgctagttggagtaataaatctctggaacagatttggaatcacacgacctggatggagtgggacagagaaattaacaattacacaagcttaatacactccttaattgaagaatcgcaaaaccagcaagaaaagaatgaacaagaattattggaattagataaatgggcaagtttgtggaattggtttaacataacaaattggctgtggtatataaaattattcataatgatagtaggaggcttggtaggtttaagaatagtttttgctgtactttctatagtgaatagagttaggcagggatattcaccattatcgtttcagacccacctcccaaccccgaggggacccgacaggcccgaaggaatagaagaagaaggtggagagagagacagagacagatccattcgattagtgaacggatctcgacggtatcgatcacgagactagcctcgacacaaatggcagtattcatccacaattttaaaagaaaaggggggattggggggtacagtgcaggggaaagaatagtagacataatagcaacagacatacaaactaaagaattacaaaaacaaattacaaaaattcaaaattttcgggtttattacagggacagcagagatccagtttatcgacttaacttgtttattgcagcttataatggttacaaataaggcaatagcatcacaaatttcacaaataaggcatttttttcactgcattctagttttggtttgtccaaactcatcaatgtatcttatcatgtctggatctcaaatccctcggaagctgcgcctgtcttaggttggagtgatacatttttatcacttttacccgtctttggattaggcagtagctctgacggccctcctgtcttaggttagtgaaaaatgtcactctcttacccgtcattggctgtccagcttagctcgcaggggaggtggtcttcattactggctagctcttctgcctctaaacagcatctggctcctcttcctcttgccggttttagcagcggggctcagttcggccatcacttggatcagctcgtggatggcctttctctggacgttcagatcggtcacggagtagttggtgagcttctcgaagtcgtccctcttcttcttgttgctgttgaagaatttcacgttcatatcctccttgatggtctcgacgctcttctggatgctctggtcgtccttgaagttcttgaagagcttgaagtagaagctcacgatctgggactgcatgatctttctatcggactcctccttccagttcttcagaatgccgagaaacagtgtgccgttatcggccacgtcggagtggccggcattgaagtacttcttgaggttctcggcctccttcacgtaggggtcttggcagtagcagcccagagagcccagcacgatgcacagctggaaggccagaatgtagctggtgtacttcatggggccggggttctcctcgacatctccggcttgcttcagcagagagaaattggtggcgccgctgcccatttgccgaagagccctcaggctggactgcaggaactccttaaagctgcgcagaatgagatgagttgtcatgtcctgcagccactggttctgtgcctgcagcttcgtcagcaggctggcatttgtggttgggtcaggggtggttattgcatctagattctttgcctttttctgcaggaactggatcaggacttttgtactcatctgcacagctctggcttgttcctcactactctcaaatctgttctggaggtactctaggtatacctcaaactccaaaagaccagtgatgattttcaccaggcaagtctcctcattgaatccagattggaagcatccatctttttcagccatctttggaaggttcaggttgttttctgccagtgcctctttgctgctttcacacatgttactcttgttacatgtctcctttctcagggctgagatgccgtcgaggatgtaccgaatttgtttgtcaattcgttctgaagaggtgagtggctgtctgtgtggggcggctacatctttggaatcttctcctgggggtactggggcagggaaggcagcaggcaacaccaggagcagccccagggagaaggcaactggaccgaaggcgcttgtggagaaggagttcatggtggccaggagttgaggttactgtgagtagtgattaaagagagtgatagggaactcttgaacaagagatgcaatttatactgttaattctggaaaaatattatgggggtgtcaaaatgtcccgggaccaattgacgccttctgtatgaaacagtttttcctcctaattgacgccttctgtatgaaacagtttttcctcctaattgacgccttctgtatgaaacagtttttcctcctaattcgatgggaccaattgacgccttctgtatgaaacagtttttcctcctaattgacgccttctgtatgaaacagtttttcctcctaattgacgccttctgtatgaaacagtttttcctcctaattcgatatcaagcttatcgataccgtcgacctcgatgaattcgctagcaaatccactttggctcgagaagcttgatat

SEQ ID NO: 533 - DNA, 10436 bp, Artificial Sequence
  synthesized
cggctccggtgcccgtcagtgggcagagcgcacatcgcccacagtccccgagaagttggggggaggggtcggcaattgaaccggtgcctagagaaggtggcgcggggtaaactgggaaagtgatgtcgtgtactggctccgcctttttcccgagggtgggggagaaccgtatataagtgcagtagtcgccgtgaacgttctttttcgcaacgggtttgccgccagaacacaggatccgccaccatggccttaccagtgaccgccttgctcctgccgctggccttgctgctccacgccgccaggccggatatccagatgacccagagcccgagcagcctgagcgcgagcgtgggtgatcgcgtgaccattacctgcagggcaagtcaggacattagtaaatatttaaattggtatcagcagaaaccgggtaaagcgccgaaactgttaatttatcatacatcaagattacactcaggcgtgccgtcgcgttttagcggctcgggttcgggcaccgattttaccctgaccatctcgagcttgcagccggaggacttcgccacctactattgccaacagggtaatacgcttccgtacacgttcggtcagggcaccaaagtggagatcaaaggtggcggtggctcgggcggtggtgggtcgggtggcggcggatctgaggtgcagctggtggagtctgggggaggcttggtacagcctggggggtccctgagactctcctgtgcagcctctggagtgtccctgcctgattatggcgtgtcctgggtccgccaggctccagggaaggggctggagtgggtttcagtgatctggggcagcgagacaacctactacaacagcgccctgaagtcccgattcaccatctccagagacaatgccaagaactcactgtatctgcaaatgaacagcctgagagccgaggacacggctgtgtattactgtgcgaagcactactactacggcggcagctacgctatggactactggggccaaggaaccctggtcaccgtgtcctcaaccacgacgccagcgccgcgaccaccaacaccggcgcccaccatcgcgtcgcagcccctgtccctgcgcccagaggcgtgccggccagcggcggggggcgcagtgcacacgagggggctggacttcgcctgtgatatctacatctgggcgcccttggccgggacttgtggggtccttctcctgtcactggttatcaccctttactgcaaacggggcagaaagaaactcctgtatatattcaaacaaccatttatgagaccagtacaaactactcaagaggaagatggctgtagctgccgatttccagaagaagaagaaggaggatgtgaactgagagtgaagttcagcaggagcgcagacgcccccgcgtaccagcagggccagaaccagctctataacgagctcaatctaggacgaagagaggagtacgatgttttggacaagaggcgtggccgggaccctgagatggggggaaagccgagaaggaagaaccctcaggaaggcctgtacaatgaactgcagaaagataagatggcggaggcctacagtgagattgggatgaaaggcgagcgccggaggggcaaggggcacgatggcctttaccagggtctcagtacagccaccaaggacacctacgacgcccttcacatgcaggccctgccccctcgctaagtcgactctagaactagtaatcaacctctggattacaaaatttgtgaaagattgactggtattcttaactatgttgctccttttacgctatgtggatacgctgctttaatgcctttgtatcatgctattgcttcccgtatggctttcattttctcctccttgtataaatcctggttgctgtctctttatgaggagttgtggcccgttgtcaggcaacgtggcgtggtgtgcactgtgtttgctgacgcaacccccactggttggggcattgccaccacctgtcagctcctttccgggactttcgctttccccctccctattgccacggcggaactcatcgccgcctgccttgcccgctgctggacaggggctcggctgttgggcactgacaattccgtggtgttgtcggggaaatcatcgtcctttccttggctgctcgcctgtgttgccacctggattctgcgcgggacgtccttctgctacgtcccttcggccctcaatccagcggaccttccttcccgcggcctgctgccggctctgcggcctcttccgcgtcttcgccttcgccctcagacgagtcggatctccctttgggccgcctccccgcctgccgcggaattcgagctcggtacctttaagaccaatgacttacaaggcagctgtagatcttagccactttttaaaagaaaaggggggactggaagggctaattcactcccaacgaagacaagatctgctttttgcttgtactgggtctctctggttagaccagatctgagcctgggagctctctggctaactagggaacccactgcttaagcctcaataaagcttgccttgagtgcttcaagtagtgtgtgcccgtctgttgtgtgactctggtaactagagatccctcagacccttttagtcagtgtggaaaatctctagcagtagtagttcatgtcatcttattattcagtatttataacttgcaaagaaatgaatatcagagagtgagaggaacttgtttattgcagcttataatggttacaaataaagcaatagcatcacaaatttcacaaataaagcatttttttcactgcattctagttgtggtttgtccaaactcatcaatgtatcttatcatgtctggctctagctatcccgcccctaactccgcccatcccgcccctaactccgcccagttccgcccattctccgccccatggctgactaattttttttatttatgcagaggccgaggccgcctcggcctctgagctattccagaagtagtgaggaggcttttttggaggcctagggacgtacccaattcgccctatagtgagtcgtattacgcgcgctcactggccgtcgttttacaacgtcgtgactgggaaaaccctggcgttacccaacttaatcgccttgcagcacatccccctttcgccagctggcgtaatagcgaagaggcccgcaccgatcgcccttcccaacagttgcgcagcctgaatggcgaatgggacgcgccctgtagcggcgcattaagcgcggcgggtgtggtggttacgcgcagcgtgaccgctacacttgccagcgccctagcgcccgctcctttcgctttcttcccttcctttctcgccacgttcgccggctttccccgtcaagctctaaatcgggggctccctttagggttccgatttagtgctttacggcacctcgaccccaaaaaacttgattagggtgatggttcacgtagtgggccatcgccctgatagacggtttttcgccctttgacgttggagtccacgttctttaatagtggactcttgttccaaactggaacaacactcaaccctatctcggtctattcttttgatttataagggattttgccgatttcggcctattggttaaaaaatgagctgatttaacaaaaatttaacgcgaattttaacaaaatattaacgcttacaatttaggtggcacttttcggggaaatgtgcgcggaacccctatttgtttatttttctaaatacattcaaatatgtatccgctcatgagacaataaccctgataaatgcttcaataatattgaaaaaggaagagtatgagccatattcaacgggaaacgtcttgctctaggccgcgattaaattccaacatggatgctgatttatatgggtataaatgggctcgcgataatgtcgggcaatcaggtgcgacaatctatcgattgtatgggaagcccgatgcgccagagttgtttctgaaacatggcaaaggtagcgttgccaatgatgttacagatgagatggtcagactaaactggctgacggaatttatgcctcttccgaccatcaagcattttatccgtactcctgatgatgcatggttactcaccactgcgatccccgggaaaacagcattccaggtattagaagaatatcctgattcaggtgaaaatattgttgatgcgctggcagtgttcctgcgccggttgcattcgattcctgtttgtaattgtccttttaacagcgatcgcgtatttcgtctggctcaggcgcaatcacgaatgaataacggtttggttgatgcgagtgattttgatgacgagcgtaatggctggcctgttgaacaagtctggaaagaaatgcataaacttttgccattctcaccggattcagtcgtcactcatggtgatttctcacttgataaccttatttttgacgaggggaaattaataggttgtattgatgttggacgagtcggaatcgcagaccgataccaggatcttgccatcctatggaactgcctcggtgagttttctccttcattacagaaacggctttttcaaaaatatggtattgataatcctgatatgaataaattgcagtttcatttgatgctcgatgagtttttctaactgtcagaccaagtttactcatatatactttagattgatttaaaacttcatttttaatttaaaaggatctaggtgaagatcctttttgataatctcatgaccaaaatcccttaacgtgagttttcgttccactgagcgtcagaccccgtagaaaagatcaaaggatcttcttgagatcctttttttctgcgcgtaatctgctgcttgcaaacaaaaaaaccaccgctaccagcggtggtttgtttgccggatcaagagctaccaactctttttccgaaggtaactggcttcagcagagcgcagataccaaatactgttcttctagtgtagccgtagttaggccaccacttcaagaactctgtagcaccgcctacatacctcgctctgctaatcctgttaccagtggctgctgccagtggcgataagtcgtgtcttaccgggttggactcaagacgatagttaccggataaggcgcagcggtcgggctgaacggggggttcgtgcacacagcccagcttggagcgaacgacctacaccgaactgagatacctacagcgtgagctatgagaaagcgccacgcttcccgaagggagaaaggcggacaggtatccggtaagcggcagggtcggaacaggagagcgcacgagggagcttccagggggaaacgcctggtatctttatagtcctgtcgggtttcgccacctctgacttgagcgtcgatttttgtgatgctcgtcaggggggcggagcctatggaaaaacgccagcaacgcggcctttttacggttcctggccttttgctggccttttgctcacatgttctttcctgcgttatcccctgattctgtggataaccgtattaccgcctttgagtgagctgataccgctcgccgcagccgaacgaccgagcgcagcgagtcagtgagcgaggaagcggaagagcgcccaatacgcaaaccgcctctccccgcgcgttggccgattcattaatgcagctggcacgacaggtttcccgactggaaagcgggcagtgagcgcaacgcaattaatgtgagttagctcactcattaggcaccccaggctttacactttatgcttccggctcgtatgttgtgtggaattgtgagcggataacaatttcacacaggaaacagctatgaccatgattacgccaagcgcgcaattaaccctcactaaagggaacaaaagctggagctgcaagcttaatgtagtcttatgcaatactcttgtagtcttgcaacatggtaacgatgagttagcaacatgccttacaaggagagaaaaagcaccgtgcatgccgattggtggaagtaaggtggtacgatcgtgccttattaggaaggcaacagacgggtctgacatggattggacgaaccactgaattgccgcattgcagagatattgtatttaagtgcctagctcgatacataaacgggtctctctggttagaccagatctgagcctgggagctctctggctaactagggaacccactgcttaagcctcaataaagcttgccttgagtgcttcaagtagtgtgtgcccgtctgttgtgtgactctggtaactagagatccctcagacccttttagtcagtgtggaaaatctctagcagtggcgcccgaacagggacttgaaagcgaaagggaaaccagaggagctctctcgacgcaggactcggcttgctgaagcgcgcacggcaagaggcgaggggcggcgactggtgagtacgccaaaaattttgactagcggaggctagaaggagagagatgggtgcgagagcgtcagtattaagcgggggagaattagatcgcgatgggaaaaaattcggttaaggccagggggaaagaaaaaatataaattaaaacatatagtatgggcaagcagggagctagaacgattcgcagttaatcctggcctgttagaaacatcagaaggctgtagacaaatactgggacagctacaaccatcccttcagacaggatcagaagaacttagatcattatataatacagtagcaaccctctattgtgtgcatcaaaggatagagataaaagacaccaaggaagctttagacaagatagaggaagagcaaaacaaaagtaagaccaccgcacagcaagcggccgctgatcttcagacctggaggaggagatatgagggacaattggagaagtgaattatataaatataaagtagtaaaaattgaaccattaggagtagcacccaccaaggcaaagagaagagtggtgcagagagaaaaaagagcagtgggaataggagctttgttccttgggttcttgggagcagcaggaagcactatgggcgcagcgtcaatgacgctgacggtacaggccagacaattattgtctggtatagtgcagcagcagaacaatttgctgagggctattgaggcgcaacagcatctgttgcaactcacagtctggggcatcaagcagctccaggcaagaatcctggctgtggaaagatacctaaaggatcaacagctcctggggatttggggttgctctggaaaactcatttgcaccactgctgtgccttggaatgctagttggagtaataaatctctggaacagatttggaatcacacgacctggatggagtgggacagagaaattaacaattacacaagcttaatacactccttaattgaagaatcgcaaaaccagcaagaaaagaatgaacaagaattattggaattagataaatgggcaagtttgtggaattggtttaacataacaaattggctgtggtatataaaattattcataatgatagtaggaggcttggtaggtttaagaatagtttttgctgtactttctatagtgaatagagttaggcagggatattcaccattatcgtttcagacccacctcccaaccccgaggggacccgacaggcccgaaggaatagaagaagaaggtggagagagagacagagacagatccattcgattagtgaacggatctcgacggtatcgatcacgagactagcctcgacacaaatggcagtattcatccacaattttaaaagaaaaggggggattggggggtacagtgcaggggaaagaatagtagacataatagcaacagacatacaaactaaagaattacaaaaacaaattacaaaaattcaaaattttcgggtttattacagggacagcagagatccagtttatcgacttaacttgtttattgcagcttataatggttacaaataaggcaatagcatcacaaatttcacaaataaggcatttttttcactgcattctagttttggtttgtccaaactcatcaatgtatcttatcatgtctggatctcaaatccctcggaagctgcgcctgtcttaggttggagtgatacatttttatcacttttacccgtctttggattaggcagtagctctgacggccctcctgtcttaggttagtgaaaaatgtcactctcttacccgtcattggctgtccagcttagctcgcaggggaggtggtctcagtcgttggagccgaagtccagagagatgatggtgtctccagcggcgggggccagcagtgtcagagcatcgggctccttcttcagcttgtcaaacagagagctggtgtcctcgctctccaccttggtgaagagctgggtcatcttcatgtcgctgctctccacgggcttcagcacgcactcggtctgctgcagagagaagatcagatcgtgctggatgattcctctggcagcggcctctctagcagcggcttcgctggcgttcaggtagctcatcacccggtcgatggtcacggcccggatccggaaggcatgcaggaggatgcacagcttgatcttggtcttgtagaagtcgggctcttccaggctggacttctggggcactgtctcgctgttgaagttcagggcctgcatcagctcgtcgatcacggccagcatgttctgatccaggaagatctgccgcttggggtccatcagcagcttggcgttcatggtcttgaactccacctggtacatcttcaggtcctcgtagatgctgctcaggcacagggccatcatgaagctggtctttctgctggccaggcaagagccgttggtgatgaagcttgtctcccgagagttcagacagctctcgttcttggtcagttccaggggcaggcaggcctccacggtgctggtcttatccttggtgatgtcctcgtggtcgatttcctcgctggtgcaggggtagaattccagggtctgccgggccttctgcagcatgttgctcacggcccgcagcaggttctggctgtggtgcaggcaggggaacatgccggggtcgggggtagccacgggcaggttccggcttcctccgccccctccgccgctgcagggcacgctggcccactcggaccaggagctgctgtagtaccggtcctgggcccgcacgctgatgctggcgttcttccggcagatcacggtggcgctggtcttgtcggtgaacacccggtctttcttctcccgcttgctcttgccctgcacctgcacacagaaggtcaggctgaagtagctgtggggggtggaccaggtgtcagggtactcccaggacacctccacctgccggctgttcttcaggggcttcagctgcaggttcttgggggggtcgggcttgatgatgtcccggatgaaaaagctggaggtgtagttctcgtacttcagcttgtgcacggcgtccaccatcacctcgatgggcaggctttcctcggcggcagggcaggcgctatcttcctggcactcgacgctgtactcgtactctttgttgtcgccccgcactctctcggcgctcagggtggcggctccgcaggtcacgccctgagggtcgctgctgccccggctgctcttcacgctgaaggtcaggtcggtgctgatggtggtcagccaccaacaggtgaaccggccgctgtagttcttggcctcgcaccgcaggaaggtcttgttcttgggctctttctggtccttcaggatgtcggtggaccagatgccatcctctttcttgtgcagcagcagcaggctgtgggacagcacttcgccgcccttgtggcaggtgtactggccggcgtcgccgaactctttgacctggatggtcagggtcttgccgctgcccagcacctcgctgctctggtccagggtccaggtgatgccgtcctcttcgggggtgtcgcaggtcagcaccaccatctcgccaggggcgtcgggataccagtccagctccaccacgtacacgtctttcttcagctcccagatggccaccagggggctggccaggaacaccaggctgaaccagctgatgaccagctgctgatgacacatggtggccaggagttgaggttactgtgagtagtgattaaagagagtgatagggaactcttgaacaagagatgcaatttatactgttaattctggaaaaatattatgggggtgtcaaaatgtcccgggaccaattgacgccttctgtatgaaacagtttttcctcctaattgacgccttctgtatgaaacagtttttcctcctaattgacgccttctgtatgaaacagtttttcctcctaattcgatgggaccaattgacgccttctgtatgaaacagtttttcctcctaattgacgccttctgtatgaaacagtttttcctcctaattgacgccttctgtatgaaacagtttttcctcctaattcgatatcaagcttatcgataccgtcgacctcgatgaattcgctagcaaatccactttggctcgagaagcttgatat

SEQ ID NO: 534 - protein, 264 aa, Artificial Sequence
  Synthesized
MALPVTALLLPLALLLHAARPQSVLTQPASVSGSPGQSVTISCTGTSSDVGGYNYVSWYQQHPGKPPKLMIYEVSKRPSGVPDRFSGSKSGNTASLTISGLQAEDEADYYCSSHTSSNTLIFGGGTKVTVLGGGGSGGGGSGGGGSEVQLVQSGAEVKKPGESLKISCKGSGYTFTNYWIGWVRQMPGKGLEWMGRIYPSDSYTNYSPSFQGQVTISADKSISTAYLQWSSLKASDTAMYYCARDLEPTHHYSWGQGTLVTVSS

SEQ ID NO: 535 - protein, 485 aa, Artificial Sequence
  Synthesized
MALPVTALLLPLALLLHAARPEIVMTQSPATLSVSPGERATLSCRASQSVSRNLAWYQQKPGQAPRLLIYGASTRATGIPARFSGSGSGTEFTLTIGSLQSEDFAVYYCQQYKTWPRTFGQGTNVEIKGGGGSGGGGSGGGGSQVQLQQWGAGLLKPSETLSLTCAVFGGSFSGYYWSWIRQPPGKGLEWIGEINHRGNTNDNPSLKSRVTISVDTSKNQFALKLSSVTAADTAVYYCARERGYTYGNFDHWGQGTLVTVSSAKPTTTPAPRPPTPAPTIASQPLSLRPEACRPAAGGAVHTRGLDFACDIYIWAPLAGTCGVLLLSLVITKRGRKKLLYIFKQPFMRPVQTTQEEDGCSCRFPEEEEGGCELRVKFSRSADAPAYKQGQNQLYNELNLGRREEYDVLDKRRGRDPEMGGKPRRKNPQEGLYNELQKDKMAEAYSEIGMKGERRRGKGHDGLYQGLSTATKDTYDALHMQALPPR

1-19. (canceled)

20. A pharmaceutical composition comprising modified T cells, wherein the modified T cells comprise chimeric antigen receptor (CAR) and an exogenous polynucleotide encoding one or more proteins, the one or more proteins comprising IFNγ.

21. The pharmaceutical composition of claim 20, wherein the exogenous polynucleotide comprises SEQ ID NO: 469 and a polynucleotide encoding SEQ ID NO: 328.

22. The pharmaceutical composition of claim 20, wherein the modified T cells express and secrete the one or more proteins in response to activation of the modified T cells, hypoxia, or a combination thereof.

23. The pharmaceutical composition of claim 20, wherein the exogenous polynucleotide is present in the modified T cell in a recombinant DNA construct, in an mRNA, or in a viral vector.

24. The pharmaceutical composition of claim 20, wherein the one or more proteins further comprise IL-6.

25. The pharmaceutical composition of claim 24, wherein the exogenous polynucleotide comprises a polynucleotide encoding SEQ ID NOS: 287 and a polynucleotide encoding SEQ ID NO: 328.

26. The pharmaceutical composition of claim 20, wherein the exogenous polynucleotide comprises a promoter comprising a binding site for a transcription modulator that modulates the expression and/or secretion of the one or more proteins in the modified T cells.

27. The pharmaceutical composition of claim 26, wherein the transcription modulator comprises Hif1a, NFAT, FOXP3, or NFkB.

28. The pharmaceutical composition of claim 20, wherein the exogenous polynucleotide comprises SEQ ID NO: 469.

29. The pharmaceutical composition of claim 20, wherein the pharmaceutical composition further comprises modified T cells engineered to express IL-12.

30. The pharmaceutical composition of claim 29, wherein the modified T cells engineered to express IL-12 express and secrete IL-12 in response to activation of the modified T cells, hypoxia, or a combination thereof.

31. The pharmaceutical composition of claim 20, wherein the CAR comprises an extracellular domain, a transmembrane domain, and an intracellular domain.

32. The pharmaceutical composition of claim 31, wherein the CAR binds TSHR, CD19, CD123, CD22, CD30, CD171, CS-1, CLL-1, CD33, EGFRvIII, GD2, GD3, BCMA, Tn Ag, PSMA, ROR1, FLT3, FAP, TAG72, CD38, CD44v6, CEA, EPCAM, B7H3, KIT, IL-13Ra2, Mesothelin, IL-11Ra, PSCA, PRSS21, VEGFR2, LewisY, CD24, PDGFR-beta, SSEA-4, CD20, Folate receptor alpha, ERBB2 (Her2/neu), MUC1, EGFR, NCAM, Prostase, PAP, ELF2M, Ephrin B2, IGF-I receptor, CAIX, LMP2, gp100, bcr-abl, tyrosinase, EphA2, Fucosyl GM1, sLe, GM3, TGS5, HMWMAA, o-acetyl-GD2, Folate receptor beta, TEM1/CD248, TEM7R, CLDN6, GPRC5D, CXORF61, CD97, CD179a, ALK, Polysialic acid, PLAC1, GloboH, NY-BR-1, UPK2, HAVCR1, ADRB3, PANX3, GPR20, LY6K, OR51E2, TARP, WT1, NY-ESO-1, LAGE-1a, MAGE-A1, legumain, HPV E6, E7, MAGE A1, ETV6-AML, sperm protein 17, XAGE1, Tie 2, MAD-CT-1, MAD-CT-2, Fos-related antigen 1, p53, p53 mutant, prostein, survivin and telomerase, PCTA-1/Galectin 8, MelanA/MART1, Ras mutant, hTERT, sarcoma translocation breakpoints, ML-IAP, ERG (TMPRSS2 ETS fusion gene), NA17, PAX3, Androgen receptor, Cyclin B1, MYCN, RhoC, TRP-2, CYP1B1, BORIS, SART3, PAX5, OY-TES1, LCK, AKAP-4, SSX2, RAGE-1, human telomerase reverse transcriptase, RU1, RU2, intestinal carboxyl esterase, mut hsp70-2, CD79a, CD79b, CD72, LAIR1, FCAR, LILRA2, CD300LF, CLEC12A, BST2, EMR2, LY75, GPC3, FCRL5, or IGLL1.

33. The pharmaceutical composition of claim 31, wherein the intracellular domain comprises a co-stimulatory domain comprising an intracellular domain of a co-stimulatory molecule selected from the group consisting of CD27, CD28, 4-1 BB (CD137), OX40, CD30, CD40, PD-1, ICOS, lymphocyte function-associated antigen-1 (LFA-1), CD2, CD7, LIGHT, NKG2C, B7-H3, a ligand that specifically binds with CD83, CDS, ICAM-1, GITR, BAFFR, HVEM (LIGHTR), SLAMF7, NKp80 (KLRF1), CD160, CD19, CD4, CD8alpha, CD8beta, IL2R beta, IL2R gamma, IL7R alpha, ITGA4, VLA1, CD49a, ITGA4, IA4, CD49D, ITGA6, VLA-6, CD49f, ITGAD, CD11d, ITGAE, CD103, ITGAL, CD11a, LFA-1, ITGAM, CD11b, ITGAX, CD11c, ITGB1, CD29, ITGB2, CD18, LFA-1, ITGB7, TNFR2, TRANCE/RANKL, DNAM1 (CD226), SLAMF4 (CD244, 2B4), CD84, CD96 (Tactile), CEACAM1, CRTAM, Ly9 (CD229), CD160 (BY55), PSGL1, CD100 (SEMA4D), CD69, SLAMF6 (NTB-A, Ly108), SLAM (SLAMF1, CD150, IPO-3), BLAME (SLAMF8), SELPLG (CD162), LTBR, LAT, GADS, SLP-76, PAG/Cbp, NKp44, NKp30, NKp46, and NKG2D.

34. A method of inducing T cell response in a subject in need thereof, the method comprising administering an effective amount of the pharmaceutical composition of claim 20 to the subject.
